(19) United States
(12) Patent Application Publication
(10) Pub. No.: US 2014/0037649 A1
(43) Pub. Date: Feb. 6, 2014

(54) DIAGNOSTIC AND/OR SCREENING AGENTS AND USES THEREFOR

(71) Applicants: Richard Bruce Brandon, Boonah (AU); Mervyn Rees Thomas, Chapel Hill (AU); Glenn Stone, Glenwood (AU)

(72) Inventors: Richard Bruce Brandon, Boonah (AU); Mervyn Rees Thomas, Chapel Hill (AU); Glenn Stone, Glenwood (AU)

(73) Assignee: IMMUNEXPRESS PTY LTD, TOOWONG (AU)

(21) Appl. No.: 13/989,738

(22) PCT Filed: Nov. 24, 2011
(86) PCT No.: PCT/AU11/01540

§ 371 Date: Oct. 17, 2013

Related U.S. Application Data
(60) Provisional application No. 61/417,381, filed on Nov. 26, 2010.

(51) Int. Cl. C12Q 1/68

(52) U.S. Cl. CPC C12Q 1/6876
USPC 424/164.1; 506/9; 435/6.12; 514/1.4

(57) ABSTRACT

Disclosed are methods and apparatus for diagnosis, detection of host response, monitoring, treatment or management of sepsis, infection-negative systemic inflammatory response syndrome (SIRS) and post-surgical inflammation in mammals. More particularly, the present invention discloses marker genes and their splice variant transcripts as well as their expression products, which are useful for distinguishing between sepsis and infection-negative SIRS, including post-surgical inflammation, and to the use of these markers in grading, monitoring, treatment and management of these conditions.

### FIELD OF THE INVENTION

[0001] This invention relates generally to methods and apparatus for diagnosis, detection of host response, monitoring, treatment or management of sepsis, infection-negative systemic inflammatory response syndrome (SIRS) and post-surgical inflammation in mammals. More particularly, the present invention relates to marker genes and their splice variant transcripts as well as their expression products that are useful for distinguishing between sepsis and infection-negative SIRS, including post-surgical inflammation, and to the use of these markers in grading, monitoring, treatment and management of these conditions. The invention has practical use in early diagnosis, diagnosis of mild or sub-clinical sepsis or infection-negative SIRS or post-surgical inflammation, in the detection of specific cell immune responses as part of active or progressive disease, in monitoring clinically affected subjects, and in enabling better treatment and management decisions to be made in clinically and sub-clinically affected subjects. Additionally, the invention has practical use in monitoring and grading patients in critical care or intensive care units for sepsis or infection-negative SIRS or post-surgical inflammation, and in predicting clinical outcome.

### BACKGROUND OF THE INVENTION

[0002] Systemic Inflammatory Response Syndrome (SIRS) is characterized by fever or hypothermia, leukocytosis or leukopenia, tachypnea and tachycardia. SIRS may have an infectious or non-infectious etiology and is described in association with critical conditions that include pancreatitis, ischemia, multi-trauma and severe tissue injury. Major open surgery is a controlled form of physical insult that results in varying degrees of systemic inflammation. In fact, it has been reported that the occurrence of SIRS following cardiac bypass surgery (Chello et al., 2006, Critical Care Medicine 34(3):660-667), open abdominal aortic repair (Brown et al., 2003, Journal of Vascular Surgery 37(3):600-606) and open colorectal resection (Haga et al., 1997, Critical Care Medicine 25(12):1994-2000) is very common, as well as a major cause of postoperative complications including death. Published findings by Michalopoulos and colleagues indicate 100% of cardiac surgical patients (n=2615; mean age 60.8.7 yrs) in their unit develop SIRS during the first 12 hours of post-operative care (Michalopoulos et al., 2005, Intensive Care Medicine 22(1):S134). Recent research has suggested that because of the amount of cellular damage (necrosis) from major physical injury and trauma, mitochondrial proteins are released into circulation and stimulate damage-associated molecular patterns (DAMPs). This is significant as mitochondria are cellular organelles which were originally derived from bacteria via a process known as evolutionary endosymbiosis. It is these DAMPS that stimulate an acute phase response by the innate immune system that is biologically concordant with pathogen-associated molecular patterns (PAMPs) released during infection (Zhang et al., 2010, Nature 464:104-107).

[0003] If infection is suspected in addition to the any of the above SIRS clinical presentations, the term sepsis is applied. Sepsis can be defined as a systemic inflammatory response to infection; typically a Gram negative or Gram positive bacterial or fungal infection. However, microbiological evidence of a circulating pathogen is not necessary to confirm the diagnosis of sepsis. Severe sepsis includes hypotension and evidence of organ dysfunction. When hypotension cannot be managed with intravenous fluids, the diagnosis of septic shock is applied (Bone et al., 1992, Chest 101:1644-55; American College of Chest Physicians/Society of Critical Care Medicine Consensus Conference. Definitions of sepsis and organ failure and guidelines for the use of innovative therapies in sepsis. 1992, Crit Care Med. 20(6):864-874; Bernard et al., (PROWESS Study Group), 2001, N Engl J Med. 344(10):699-709). It was thus recommended at the 1991 Consensus Conference that, when patients are identified as having SIRS or multiple organ dysfunction syndrome (MODS), sequential (i.e., daily or more frequently) risk stratification or probability estimate techniques should be applied to describe the course of the syndrome (Bone et al., 1992, supra; American College of Chest Physicians/Society of Critical Care Medicine Consensus Conference, 1992, supra).

[0004] Sepsis is a life-threatening disorder and the leading cause of mortality in the adult intensive care unit (ICU) ranging from between 18-50% (Sundararajan et al., 2005, Crit. Care Med. 33:71-80; Finfer et al., 2004, Care Med. 30:589-596; Martin et al., 2003, N Engl J. Med. 348:1546-1554; Australian Institute of Health & Welfare, Canberra (2006). Mortality over the twentieth century in Australia. Trends and patterns in major causes of death. Mortality Surveillance Series, Number 4, p49). In developed countries, the incidence of sepsis is expected to rise due to aging populations, immune-compromised patients (e.g., patients on chemotherapy, or have had a transplant or are on chronic corticosteroids), increasing longevity of patients with chronic diseases, antimicrobial resistance, especially in younger people, as well as viral illnesses such as AIDS.

[0005] Antimicrobial resistance is becoming a significant problem in critical care patient management, particularly with Gram-negative bacilli (Hotchkiss and Donaldson. 2006, Nature Reviews Immunology 6:813-822; Eber et al., 2010, Arch Intern Med. 170(4):374-353). Recent evidence suggests that indiscriminate use of antibiotics has contributed to resistance and hence, guidance on antibiotic treatment duration is now imperative in order to reduce consumption in tertiary care ICU settings (Hanberger et al., 1999, JAMA. 281:61-71).

[0006] Approximately 20 million cases of severe sepsis arise globally per annum, and account for up to 135,000 deaths in Europe and 215,000 in the USA (Neuhauser et al., 2003, JAMA. 289:885-888).

[0007] While half of these infections are estimated to be community-acquired in the United States, research suggests that the other half relate to hospital acquired infections (HAI), which account for increased hospital in-patient admission by as much as 14 days, at an average cost of $46,000 per patient (Goldmann et al., 1996, JAMA. 275:234-40). Bacterial and fungal sepsis is a significant medical challenge not only in critical care but also for hematology, transplant, medical oncology and post-surgical in-patients.

[0008] Sepsis initiates a complex immunologic response that varies over time and is dependent on pre-existing co-morbidities. Although recent research demonstrates that both inflammatory and anti-inflammatory responses are occurring in this condition, during the early host response to microbial invasion, there is generally a hyperinflammatory signal. That is, the majority of the sepsis cases are the product of bacteria and fungi that do not ordinarily cause systemic disease in immunocompetent hosts. The local innate immune mechanisms essentially stimulate the release of cytokines, chemokines, prostanoids and leukotrienes that increase blood flow to local sources of infection and result in an influx of white blood cells. During this processes, toll-like receptors (TLRs) are also activated as part of the innate immune response and have direct anti-microbial activity in addition to influencing the antigen-specific adaptive response. TLRs are a type of pattern recognition receptor that can identify PAMPs as soon as microbes breach dermal or intestinal barriers (Hotchkiss et al., 2009, Nature Medicine. 15(5):496-497). However, weaknesses in the innate host defence and release of endotoxins or other virulence factors can quickly lead to severe sepsis following a strong inflammatory response.

[0009] For many decades, the cornerstone of sepsis diagnosis and treatment has been identifying the causative circulating pathogen and quantitating single immune-related blood analytes—medical determinants which are not necessarily specific to sepsis, but routinely conducted to assess the patient's physiological response to the pathogen. Currently, the gold standard for detection of bacteria and fungi is blood culture in microbiological media with the aim of growing the causative organism. This method typically requires between 48-72 hours of incubation before the microbe can be identified and antibiotic sensitivity provided, such that evidence-based treatment can be implemented in comparison to the initial empiric practices. In contrast, it has recently been proposed by Hotchkiss et al. (Adib-Conquy et al, 2009, Thromb Haemast. 101(1):36-47) that the development of sepsis represents the harmful consequences of an exuberant innate immune response. While most patients survive this “hyperinflammatory phase,” it was suggested that what follows is a stage of protracted immunosuppression that is referred to as immunoparalysis (Monneret et al, 2008, Mol Med. 14(1-2):64-78; Wade et al, 2009, Science 326:865-876). This secondary immunosuppression has been characterized by the loss of delayed type hypersensitivity response to positive control antigens, failure to clear the primary infection and development of secondary infections which can include activation of normally latent viruses such as CMV or HHV. Taken together, this implies that current clinical focus should be on enhancing/maintaining immune competence in critically ill patients. Thus, to achieve such a clinical goal there needs to be a method of monitoring the status of the immune system so that immunotherapy can be timed appropriately.

[0010] In terms of treatment and management plans; SIRS (also referred to herein as “infection-negative SIRS”) and sepsis are quite different. On initial presentation to the Emergency Department, a patient displaying two or more SIRS criteria will be treated with intravenous glucocorticosteroids (GCS) and antibiotics, even if infection is only suspected. Empiric treatment will continue until positive microbiology findings are known, past medical history is confirmed and/or there has been a positive clinical response to early management. If it is clear, based on clinical presentation and reason for admission, that the SIRS response is related to acute trauma, for example motor vehicle injury or an acute inflammatory condition such as anaphylaxis, the patient will be managed with other intravenous fluids, blood products or adrenaline, where indicated. However, it is important that a patient with a true SIRS response is definitively managed as early as possible so to conserve antibiotic efficacy. Likewise, it is essential that a patient with a bacterial or fungal infection be managed with antibiotics and not steroids so that immune function is not compromised. Differential diagnosis is exponentially more difficult when a patient presents to the Emergency Department with clinically significant changes to vital signs such as heart rate and blood pressure in addition to a fever. These are signs and symptoms of the early stages of infection-negative SIRS and infection-positive SIRS (sepsis), and impossible to delineate the two conditions clinically. However, although the two conditions can be separated based on physiological endpoints, the molecular biology is considered only capable of identifying changes in the chemical signatures that appear when a severe infection is developing.

[0011] At the present time, diagnostic practices in clinical pathology are moving toward gene-protein-metabolite targeted pathways, as novel molecular profiles offer the opportunity to assess discrete yet unique changes in multiple biomarkers in a matter of hours, and potentially minutes. The combination of high specificity and sensitivity, low contamination risk and blood collection, as well as processing speed has made molecular techniques, such as quantitative real time PCR (qRT PCR) technology, an efficient alternative in comparison to microbiological culture.

[0012] Given that the majority of patients (>80%) admitted to the tertiary care ICU setting have SIRS of varying etiologies, including following major surgery, it is of enormous clinical importance that those patients who have a suspected infection or are at high risk of infection can be identified early and be graded and monitored, in order to initiate evidence-based and goal-orientated medical therapy. This is critical, as the acute management plans for SIRS with and without infection are very different. Dependence on empiric treatment means that some patients may be receiving excessive antibiotics while others are receiving treatment (e.g. corticosteroids) that is immuno-suppressive because a clear site of infection has not been identified. Furthermore, once patients are identified as having sepsis, regular monitoring of the immune system is considered essential for clinicians to modulate therapy dependent on immune system status, the type of infection and multi-organ complications that may be associated with sepsis.

### SUMMARY OF THE INVENTION

[0013] The present invention arises from the unexpected discovery that the range of transcripts expressed from certain individual genes in peripheral blood varies between patients with sepsis, patients with infection-negative SIRS (also referred to herein as “inSIRS”) and patients following major surgery. In particular, the present inventors have found that certain exons of individual genes are differentially expressed in peripheral blood between these conditions (also referred to herein as “condition-separating exons”) whilst others from the same genes are not so differential expressed. Based on this discovery, the present inventors have developed various methods and kits, which take advantage of condition-separating exons to detect the presence, absence or risk of development of sepsis, inSIRS and systemic inflammation following major surgery. In certain embodiments, these assays and kits represent a significant advance over prior art assays and kits which have not been able to distinguish between systemic inflammation following major surgery and infection-negative SIRS. Accordingly, in these embodiments, the present invention provides a means to separate these two groups from themselves and from sepsis allowing for qualitative or quantitative grading of inflammatory response as if there were a “continuum” of severity of inflammatory response from post-surgical inflammation through to sepsis.

[0014] The present invention thus represents a significant advance over current technologies for the management of sepsis, infection negative SIRS and post-surgical inflammation. In certain advantageous embodiments, it relies upon measuring the level of certain markers in cells, especially circulating leukocytes, of the host. In some embodiments where circulating leukocytes are the subject of analysis, it is proposed that detection of the presence or absence of a host response to sepsis and its sequelae (also referred to herein as “sepsis-related conditions”) will be feasible at very early stages of its progression before extensive tissue damage has occurred.

[0015] The present invention addresses the problem of distinguishing between sepsis, infection-negative SIRS and post-surgical inflammation by detecting a host response that may be measured in host cells. Advantageous embodiments involve monitoring the expression of particular gene transcripts in peripheral leukocytes of the immune system, which may be reflected in changing patterns of RNA levels or protein production that correlate with the presence of active disease or response to disease.

[0016] Accordingly, in one aspect, the present invention provides methods for assessing whether a subject has, or is at risk of developing, one of a plurality of conditions selected from sepsis, infection-negative SIRS (hereafter referred to as “inSIRS”) and post-surgical inflammation. These methods generally comprise comparing the level of at least one expression product (also referred to herein as an “inflammatory response continuum” (IRC) marker expression product”) of a multi-transcript-producing gene in the subject to the level of a corresponding IRC marker expression product in at least one control subject selected from: a post-surgical inflammation-positive subject, an inSIRS positive subject, a sepsis-positive subject and a normal subject, wherein a difference between the level of the at least one IRC marker expression product and the level of the corresponding IRC marker expression product indicates whether the subject has, or is at risk of developing, one of the conditions, wherein the at least one IRC marker expression product is predetermined as being differentially expressed between at least two of the conditions and wherein at least one other expression product from the multi-transcript producing gene is predetermined as being not so differentially expressed. The at least one ICR marker expression product is suitably selected from an ICR marker transcript or an ICR marker polypeptide.

[0017] In some embodiments, the multi-transcript-producing gene is selected from the group consisting of: ankyrin repeat and death domain containing 1A (ANKDD1A) gene, rho 2 (GABRR2) gene, orthodenticle homeobox 1 (OTX1) gene, pannexin 2 (PANX2) gene, rhomboid 5 homolog 2 (Drosophila) (RHBDF2) gene, SLAM family member 7 (SLAMF7) gene, autophagy/beclin-1 regulator 1 (AMBRA1) gene, carboxylesterase 2 (intestine, liver) (CES2) gene, caseinolytic peptidase B homolog (E. coli) (CLPB) gene, homeodomain interacting protein kinase 2 (HIPK2) gene and chromosome 1 open reading frame 91 (C1ORF91) gene, N-deacetylase/N-sulfotransferase (heparan glucosaminyl) 1 (NDST1) gene, solute carrier family 36 (proton/amino acid symporter) (member 1 (SLC36A1) gene, ADAM metallopeptidase domain 19 (meltrin beta) (ADAM19) gene, cullin 7 (CUL7) gene, thyroglobulin (TG) gene, programmed cell death 1 ligand 2 (PDCD1LG2) gene, glutamate receptor (ionotropic (N-methyl D-aspartate-like 1A (GRINL1A) gene, mahogunin (ring finger 1 (MGRN1) gene, syntrophin (beta 2 (dystrophin-associated protein A 1 (59 kDa (basic component 2) (SNTB2) gene, cyclin-dependent kinase 5 (regulatory subunit 1 (p35) (CDK5R1) gene, glucosidase (alpha; acid (GAA) gene, katanin p60 subunit A-like 2 (KATNAL2) gene, carcinoembryonic antigen-related cell adhesion molecule 4 (CEACAM4) gene, zinc finger protein 335 (ZNF335) gene, aspartate beta-hydroxylase domain containing 2 (ASPHD2) gene, acidic repeat containing (ACRC) gene, butyrophilin-like 3/butyrophilin-like 8 (BTNL3, BTLN8) gene, Moloney leukemia virus 10 homolog (mouse) (MOVE)) gene, mediator complex subunit 12-like (MED12L) gene, kelch-like 6 (Drosophila) (KLHL6) gene, PDZ and LIM domain 5 (PDLIM5) gene, UDP-N-acetyl-alpha-D-galactosamine:polypeptide N-acetylgalactosaminyltransferase 10 (GALNT10) gene, secernin 1 (SCRN1) gene, vesicular (overexpressed in cancer (prosurvival protein 1 (VOPP1, RP11-289I10.2) gene, FK506 binding protein 9, 63 kDa (FKBP9, FKBP9, FKBP9L, AC091812.2) gene, kinesin family member 27 (KIF27) gene, piwi-like 4 (Drosophila) (PIWIL4) gene, telomerase-associated protein 1 (TEP1) gene, GTP cyclohydrolase 1, (GCH1) gene, proline rich 11, (PRR11) gene, cadherin 2, type 1, N-cadherin (neuronal) (CDH2) gene, protein phosphatase 1B-like (FLJ40125, AC138534.1) (PPMIN) gene, related RAS viral (r-ras) oncogene homolog, (RRAS) gene, dolichyl-diphosphooligosaccharide-protein glycosyltransferase, (DDOST) gene, anterior pharynx defective 1 homolog A (C. elegans) (APH1A) gene, tubulin tyrosine ligase (TTL) gene, testis expressed 261, (TEX261) gene, coenzyme Q2 homolog, prenyltransferase (yeast) (COQ2) gene, FCH and double SH3 domains 1, (FCHSD1) gene, BCL2-antagonist/killer 1, (BAK1) gene, solute carrier family 25 (mitochondrial carrier; phosphate carrier) member 25, (SLC25A25) gene, RELT tumor necrosis factor receptor, (RELT) gene, acid phosphatase 2, lysosomal, (ACP2) gene, TBC1 domain family, member 2B, (TBC1D2B) gene, Fanconi anemia, complementation group A, (FANCA) gene, solute carrier family 39 (metal ion transporter) member 11, (SLC39A11) gene.

[0018] In some embodiments, the methods comprise comparing the level of at least one IRC marker transcript to the level of a corresponding IRC marker transcript, wherein the IRC marker transcript is selected from the group consisting of: (a) a polynucleotide comprising a nucleotide sequence that shares at least 70% (or at least 71% to at least 99% and all integer percentages in between) sequence identity with the sequence set forth in any one of SEQ ID NO: 1, 3, 5, 7, 9, 11, 13, 15, 17, 19, 21, 23, 25, 27, 29, 31, 33, 35, 37, 39, 41, 43, 45, 47, 49, 51, 53, 55, 57, 59, 61, 63, 65, 67, 69, 71, 73, 75, 77, 79, 81, 83, 85, 87, 89, 91, 93, 95, 97, 99, 101, 103, 105, 107, 109, 111, 113, 115, 117, 119, 121, 123, 125, 127, 129, 131, 133, 135, 137, 139, 141, 143, 145, 147, 149, 151, 153, 155, 157, 159, 161, 163, 165, 167, 169, 171, 173, 175, 177, 179, 181, 183, 185, 187, 189, 191, 193, 195, 197, 199, 201, 203, 205, 207, 209, 211, 213, 215, 217, 219, 221, 223, 225, 227, 229, 231, 233, 235, 237, 239, 241, 243, 245, 247, 249, 251, 253, 255, 257, 259, 261, 263, 265, 267, 269, 271, 273, 275, 277, 279, 281, 283, 285, 287, 289, 291, 293, 295, 297, 299, 301, 303, 305, 307, 309, 311, 313, 315, 317, 319, 321, 323, 325, 327, 329, 331, 333, 335, 337, 339, 341, 343, 345, 347, 349, 351, 353, 355, 357, 359, 361, 363, 365, 367, 369, 371, 373, 375, 377, 379, 381, 383, 385, 387, 389, 391, 393, 395, 397, 399, 401, 403, 405, 407, 409, 411, 413, 415, 417, 419, 421, 423, 425, 427, 429, 431, 433, 435, 437, 439, 441, 443, 445, 447, 449, 451, 453, 455, 457, 459, 461, 463, 465, 467, 469, 471, 473, 475, 477, 479, 481, 483, 485, 487, 489, 491, 493, 495, 497, 499, 501, 503, 505, 507, 509, 511, 513 or 515, or a complement thereof; (b) a polynucleotide comprising a nucleotide sequence that encodes a polypeptide comprising the amino acid sequence set forth in any one of SEQ ID NO: 2, 4, 6, 8, 10, 12, 14, 16, 18, 20, 22, 24, 26, 28, 30, 32, 34, 36, 38, 40, 42, 44, 46, 48, 50, 52, 54, 56, 58, 60, 62, 64, 66, 68, 70, 72, 74, 76, 78, 80, 82, 84, 86, 88, 90, 92, 94, 96, 98; 100, 102, 104, 106, 108, 110, 112, 114, 116, 118, 120, 122, 124, 126, 128, 130, 132, 134, 136, 138, 140, 142, 144, 146, 148, 150, 152, 154, 156, 158, 160, 162, 164, 166, 168, 170, 172, 174, 176, 178, 180, 182, 184, 186, 188, 190, 192, 194, 196, 198, 200, 202, 204, 206, 208, 210, 212, 214, 216, 218, 220, 222, 224, 226, 228, 230, 232, 234, 236, 238, 240, 242, 244, 246, 248, 250, 252, 254, 256, 258, 260, 262, 264, 266, 268, 270, 272, 274, 276, 278, 280, 282, 284, 286, 288, 290, 292, 294, 296, 298, 300, 302, 304, 306, 308, 310, 312, 314, 316, 318, 320, 322, 324, 326, 328, 330, 332, 334, 336, 338, 340, 342, 344, 346, 348, 350, 352, 354, 356, 358, 360, 362, 364, 366, 368, 370, 372, 374, 376, 378, 380, 382, 384, 386, 388, 390, 392, 394, 396, 398, 400, 402, 404, 406, 408, 410, 412, 414, 416, 418, 420, 422, 424, 426, 428, 430, 432, 434, 436, 438, 440, 442, 444, 446, 448, 450, 452, 454, 456, 458, 460, 462, 464, 466, 468, 470, 472, 474, 476, 478, 480, 482, 484, 486, 488, 490, 492, 494, 496, 498, 500, 502, 504, 506, 508, 510, 512, 514 or 516; (c) a polynucleotide comprising a nucleotide sequence that encodes a polypeptide that shares at least 70% (or at least 71% to at least 99% and all integer percentages in between) sequence similarity or identity with at least a portion of the sequence set forth in SEQ ID NO:2, 4, 6, 8, 10, 12, 14, 16, 18, 20, 22, 24, 26, 28, 30, 32, 34, 36, 38, 40, 42, 44, 46, 48, 50, 52, 54, 56, 58, 60, 62, 64, 66, 68, 70, 72, 74, 76, 78, 80, 82, 84, 86, 88, 90, 92, 94, 96, 98, 100, 102, 104, 106, 108, 110, 112, 114, 116, 118, 120, 122, 124, 126, 128, 130, 132, 134, 136, 138, 140, 142, 144, 146, 148, 150, 152, 154, 156, 158, 160, 162, 164, 166, 168, 170, 172, 174, 176, 178, 180, 182, 184, 186, 188, 190, 192, 194, 196, 198, 200, 202, 204, 206, 208, 210, 212, 214, 216, 218, 220, 222, 224, 226, 228, 230, 232, 234, 236, 238, 240, 242, 244, 246, 248, 250, 252, 254, 256, 258, 260, 262, 264, 266, 268, 270, 272, 274, 276, 278, 280, 282, 284, 286, 288, 290, 292, 294, 296, 298, 300, 302, 304, 306, 308, 310, 312, 314, 316, 318, 320, 322, 324, 326, 328, 330, 332, 334, 336, 338, 340, 342, 344, 346, 348, 350, 352, 354, 356, 358, 360, 362, 364, 366, 368, 370, 372, 374, 376, 378, 380, 382, 384, 386, 388, 390, 392, 394, 396, 398, 400, 402, 404, 406, 408, 410, 412, 414, 416, 418, 420, 422, 424, 426, 428, 430, 432, 434, 436, 438, 440, 442, 444, 446, 448, 450, 452, 454, 456, 458, 460, 462, 464, 466, 468, 470, 472, 474, 476, 478, 480, 482, 484, 486, 488, 490, 492, 494, 496, 498, 500, 502, 504, 506, 508, 510, 512, 514 or 516; (d) a polynucleotide expression product comprising a nucleotide sequence that hybridizes to the sequence of (a), (b), (c) or a complement thereof, under at least medium or high stringency conditions.

[0019] In some embodiments, the methods comprise comparing the level of at least one IRC marker polypeptide to the level of a corresponding IRC marker polypeptide, wherein the IRC marker polypeptide is selected from the group consisting of: (i) a polypeptide comprising the amino acid sequence set forth in any one of SEQ ID NO: 2, 4, 6, 8, 10, 12, 14, 16, 18, 20, 22, 24, 26, 28, 30, 32, 34, 36, 38, 40, 42, 44, 46, 48, 50, 52, 54, 56, 58, 60, 62, 64, 66, 68, 70, 72, 74, 76, 78, 80, 82, 84, 86, 88, 90, 92, 94, 96, 98, 100, 102, 104, 106, 108, 110, 112, 114, 116, 118, 120, 122, 124, 126, 128, 130, 132, 134, 136, 138, 140, 142, 144, 146, 148, 150, 152, 154, 156, 158, 160, 162, 164, 166, 168, 170, 172, 174, 176, 178, 180, 182, 184, 186, 188, 190, 192, 194, 196, 198, 200, 202, 204, 206, 208, 210, 212, 214, 216, 218, 220, 222, 224, 226, 228, 230, 232, 234, 236, 238, 240, 242, 244, 246, 248, 250, 252, 254, 256, 258, 260, 262, 264, 266, 268, 270, 272, 274, 276, 278, 280, 282, 284, 286, 288, 290, 292, 294, 296, 298, 300, 302, 304, 306, 308, 310, 312, 314, 316, 318, 320, 322, 324, 326, 328, 330, 332, 334, 336, 338, 340, 342, 344, 346, 348, 350, 352, 354, 356, 358, 360, 362, 364, 366, 368, 370, 372, 374, 376, 378, 380, 382, 384, 386, 388, 390, 392, 394, 396, 398, 400, 402, 404, 406, 408, 410, 412, 414, 416, 418, 420, 422, 424, 426, 428, 430, 432, 434, 436, 438, 440, 442, 444, 446, 448, 450, 452, 454, 456, 458, 460, 462, 464, 466, 468, 470, 472, 474, 476, 478, 480, 482, 484, 486, 488, 490, 492, 494, 496, 498, 500, 502, 504, 506, 508, 510, 512, 514 or 516; and (ii) a polypeptide comprising an amino acid sequence that shares at least 70% (or at least 71% to at least 99% and all integer percentages in between) sequence similarity or identity with the sequence set forth in any one of SEQ ID NO: 2, 4, 6, 8, 10, 12, 14, 16, 18, 20, 22, 24, 26, 28, 30, 32, 34, 36, 38, 40, 42, 44, 46, 48, 50, 52, 54, 56, 58, 60, 62, 64, 66, 68, 70, 72, 74, 76, 78, 80, 82, 84, 86, 88, 90, 92, 94, 96, 98, 100, 102, 104, 106, 108, 110, 112, 114, 116, 118, 120, 122, 124, 126, 128, 130, 132, 134, 136, 138, 140, 142, 144, 146, 148, 150, 152, 154, 156, 158, 160, 162, 164, 166, 168, 170, 172, 174, 176, 178, 180, 182, 184, 186, 188, 190, 192, 194, 196, 198, 200, 202, 204, 206, 208, 210, 212, 214, 216, 218, 220, 222, 224, 226, 228, 230, 232, 234, 236, 238, 240, 242, 244, 246, 248, 250, 252, 254, 256, 258, 260; 262, 264, 266, 268, 270, 272, 274, 276, 278, 280, 282, 284, 286, 288, 290, 292, 294, 296, 298, 300, 302, 304, 306, 308, 310, 312, 314, 316, 318, 320, 322, 324, 326, 328, 330, 332, 334, 336, 338, 340, 342, 344, 346, 348, 350, 352, 354, 356, 358, 360, 362, 364, 366, 368, 370, 372, 374, 376, 378, 380, 382, 384, 386, 388, 390, 392, 394, 396, 398, 400, 402, 404, 406, 408, 410, 412, 414, 416, 418, 420, 422, 424, 426, 428, 430, 432, 434, 436, 438, 440, 442, 444, 446, 448, 450, 452, 454, 456, 458, 460, 462, 464, 466, 468, 470, 472, 474, 476, 478, 480, 482, 484, 486, 488, 490, 492, 494, 496, 498, 500, 502, 504, 506, 508, 510, 512, 514 or 516.

[0020] In some embodiments, the methods comprise: (1) measuring in a biological sample obtained from the subject the level of the at least one IRC marker expression product and (2) comparing the measured level of each IRC marker expression product to the level of a corresponding IRC marker expression product in a reference sample obtained from the at least one control subject. In illustrative examples of this type, the methods comprise assessing whether the subject has, or is at risk of developing, one of the plurality of conditions when the measured level of the or each IRC marker expression product is different than the measured level of the or each corresponding IRC marker expression product. In specific embodiments, the level of an individual IRC marker expression product is at least 110%, 120%, 130%, 140%, 150%, 160%, 170%, 180%, 190%, 200%, 300%, 400%, 500%, 600%, 700%, 800%, 900% or 1000%, or no more than about 95%, 90%, 80%, 70%, 60%, 50%, 40%, 30%, 20%, 10%, 5%, 4%, 3%, 2%, 1%, 0.5%, 0.1%, 0.01%, 0.001% or 0.0001% of the level of an individual corresponding IRC expression product, which is hereafter referred to as “differential expression.”

[0021] In some embodiments, the presence or risk of development of sepsis is determined by detecting in the subject a decrease in the level of at least 1, 2, 3, 4, 5, 6, 7, 8, 9, 10, 11, 12, 13, 14, 15, 16, 17, 18, 19, 20, 21, 22, 23, 24, 25, 26, 27, 28, 29, 30, 31, 32, 33, 34, 35, 36, 37, 38, 39, 40, 41, 42, 43, 44, 45, 46, 47 or 48 IRC marker expression products from a multi-transcript-producing gene selected from the group consisting of: KIF27, OTX1, CDK5R1, FKBP9, CDH2, ADAM19, BTNL3/8 and PANX2 (hereafter referred to as “LIST A”), as compared to the level of a corresponding IRC marker expression product(s) in a post-surgical inflammation-positive control subject. In some embodiments, the presence or risk of development of post-surgical inflammation is determined by detecting in the subject an increase in the level of at least 1, 2, 3, 4, 5, 6, 7, 8, 9, 10, 11, 12, 13, 14, 15, 16, 17, 18, 19, 20, 21, 22, 23, 24, 25, 26, 27, 28, 29, 30, 31, 32, 33, 34, 35, 36, 37, 38, 39, 40, 41, 42, 43, 44, 45, 46, 47 or 48 IRC marker expression product(s) from at least one multi-transcript-producing gene selected from the group consisting of KIF27, OTX1, CDK5R1, FKBP9, CDH2, ADAM19, BTNL3/8 and PANX2(i.e., LIST A), as compared to the level of a corresponding IRC marker expression product in a sepsis control subject. In illustrative examples of these embodiments, the KIF27 IRC marker expression product comprises a nucleotide sequence corresponding to an exon selected from KIF27 exon 4 and exon 7, or an amino acid sequence encoded by that exon. Representative KIF27 IRC transcripts are set forth in SEQ ID NO: 1, 3, 5, 7 and 9 and representative KIF27 IRC polypeptides are set forth in SEQ ID NO: 2, 4, 6, 8, and 10. In other illustrative examples, the OTX1 IRC marker expression product comprises a nucleotide sequence corresponding to OTX1 exon 5 or an amino acid sequence encoded by that exon. Representative OTX1 IRC transcripts are set forth in SEQ ID NO: 11 and 13 and representative OTX1 IRC polypeptides are set forth in SEQ ID NO: 12 and 14. In still other illustrative examples, the CDK5R1 IRC marker expression product comprises a nucleotide sequence corresponding to CDK5R1 exon 2, or an amino acid sequence encoded by that exon. A representative CDK5R1 IRC transcript is set forth in SEQ ID NO: 15 and a representative CDK5R1 IRC polypeptide is set forth in SEQ ID NO: 16. In still other illustrative examples, the FKBP9 IRC marker expression product comprises a nucleotide sequence corresponding to FKBP9 exon 10, or amino acid sequence(s) encoded by that exon. A representative FKBP9 IRC transcript is set forth in SEQ ID NO: 17 and a representative FKBP9 IRC polypeptide is set forth in SEQ ID NO: 18. In still other illustrative examples, the CDH2 IRC marker expression product comprises a nucleotide sequence corresponding to CDH2 exon 10, or an amino acid sequence encoded by that exon. Representative CDH2 IRC transcripts are set forth in SEQ ID NO: 19 and 21, and representative CDH2 IRC polypeptides are set forth in SEQ ID NO: 20 and 22. In still other illustrative examples, the ADAM19 IRC marker expression product comprises a nucleotide sequence corresponding to ADAM19 exon 10, or an amino acid sequence encoded by that exon. Representative ADAM19 IRC transcripts are set forth in SEQ ID NO: 23, 25, 27 and 29, and representative ADAM19 IRC polypeptides are set forth in SEQ ID NO: 24, 26, 28 and 30. In still other illustrative examples, the BTNL8/3 IRC marker expression product comprises a nucleotide sequence corresponding to BTNL8/3 exon 6, or an amino acid sequence encoded by that exon. Representative BTNL8/3 IRC transcripts are set forth in SEQ ID NO: 31, 33, 35, 37, 39 and 41, and representative BTNL8/3 IRC polypeptides are set forth in SEQ ID NO: 32, 34, 36, 38, 40 and 42. In other illustrative examples, the PANX2 IRC marker expression product comprises a nucleotide sequence corresponding to an exon selected from PANX2 exon 1 and exon 2, or an amino acid sequence encoded by that exon. Illustrative PANX2 IRC transcripts are set forth in SEQ ID NO: 43, 45 and 47 and illustrative PANX2 IRC polypeptides are set forth in SEQ ID NO: 44, 46 and 48. Information on each gene in LIST A exhibiting splice variation and ability to determine the presence or risk of sepsis versus post-surgical inflammation, the corresponding sequence numbers, log fold changes (and direction), T adjusted P value, relevant exon number and number of possible exons in the gene, is presented in Table 7.

[0022] In some embodiments, the presence or risk of development of sepsis is determined by detecting in the subject an increase in the level of at least 1, 2, 3, 4, 5, 6, 7, 8, 9, 10, 11, 12, 13, 14, 15, 16, 17, 18, 19, 20, 21, 22, 23, 24, 25, 26, 27, 28, 29, 30, 31, 32, 33, 34, 35, 36, 37, 38, 39, 40, 41, 42, 43, 44, 45, 46, 47, 48, 49, 50, 51, 52, 53, 54, 55, 56, 57, 58, 59, 60, 61, 62, 63, 64, 65, 66, 67, 68, 69, 70, 71, 72, 73, 74, 75, 76, 77, 78, 79, 80, 81, 82, 83, 84, 85, 86, 87, 88, 89, 90, 91, 92, 93, 94, 95, 96, 97, 98, 99, 100, 101, 102, 103, 104, 105, 106, 107, 108, 109, 110, 111, 112, 113, 114, 115, 116, 117, 118, 119, 120, 121, 122, 123, 124, 125, 126, 127, 128, 129, 130, 131, 132, 133, 134, 135, 136, 137, 138, 139, 140, 141, 142, 143, 144, 145, 146, 147, 148, 149, 150, 151, 152, 153, 154, 155, 156, 157 or 158 IRC marker expression product(s) from at least one multi-transcript-producing gene selected from the group consisting of: PDLIM5, SCRN1, ASPHD2, VOPP1, ACRC, GALNT10, AC1385341, MED12L, RHBDF2, KLHL6, TEP1, PIWIL6, PRR1, RRAS, TG, ANKDD1A, GABRR2, MOV10, SLAMF7, PDCDILG2 and GCH1 (hereafter referred to as “LIST B”), as compared to the level of a corresponding IRC marker expression product in a post-surgical-positive subject control subject. In some embodiments, the presence or risk of development of post-surgical inflammation is determined by detecting in the subject a decrease in the level of at least 1, 2, 3, 4, 5, 6, 7, 8, 9, 10, 11, 12, 13, 14, 15, 16, 17, 18, 19, 20, 21, 22, 23, 24, 25, 26, 27, 28, 29, 30, 31, 32, 33, 34, 35, 36, 37, 38, 39, 40, 41, 42, 43, 44, 45, 46, 47, 48, 49, 50, 51, 52, 53, 54, 55, 56, 57, 58, 59, 60, 61, 62, 63, 64, 65, 66, 67, 68, 69, 70, 71, 72, 73, 74, 75, 76, 77, 78, 79, 80, 81, 82, 83, 84, 85, 86, 87, 88, 89, 90, 91, 92, 93, 94, 95, 96, 97, 98, 99, 100, 101, 102, 103, 104, 105, 106, 107, 108, 109, 110, 111, 112, 113, 114, 115, 116, 117, 118, 119, 120, 121, 122, 123, 124, 125, 126, 127, 128, 129, 130, 131, 132, 133, 134, 135, 136, 137, 138, 139, 140, 141, 142, 143, 144, 145, 146, 147, 148, 149, 150, 151, 152, 153, 154, 155, 156, 157 or 158 IRC marker expression product(s) from at least one multi-transcript-producing gene selected from the group consisting of: PDLIM5, SCRN1, ASPHD2, VOPP1, ACRC, GALNT10, AC1385341, MED12L, RHBDF2, KLHL6, TEP1, PIWIL6, PRR1, RRAS, TG, ANKDD1A, GABRR2, MOV10, SLAMF7, PDCDILG2 and GCH1 (i.e., LIST B), as compared to the level of a corresponding IRC marker expression product in a sepsis control subject. In illustrative examples of these embodiments, the PDLIM5 IRC marker expression product comprises a nucleotide sequence corresponding to PDLIM5 exon 5 or an amino acid sequence encoded by that exon. A non-limiting PDLIM5 IRC transcript is set forth in SEQ ID NO: 49 and a non-limiting PDLIM5 IRC polypeptide is set forth in SEQ ID NO: 50. In still other illustrative examples, the SCRN1 IRC marker expression product comprises a nucleotide sequence corresponding to SCRN1 exon 5 or an amino acid sequence encoded by that exon. Representative SCRN1 IRC transcripts are set forth in SEQ ID NO: 51, 53, 55, 57, 59, 61 and 63, and representative SCRN1 IRC polypeptides are set forth in SEQ ID NO: 52, 54, 56, 58, 60, 62 and 64. In still other illustrative examples, the ASPHD2 IRC marker expression product comprises a nucleotide sequence corresponding to ASPHD2 exon 4 or an amino acid sequence encoded by that exon. Representative ASPHD2 IRC transcripts are set forth in SEQ ID NO: 65, 67 and 69, and representative ASPHD2 IRC polypeptides are set forth in SEQ ID NO: 66, 68 and 70. In still other illustrative examples, the VOPP1 IRC marker expression product comprises a nucleotide sequence corresponding to VOPP1 exon 3 or an amino acid sequence encoded by that exon. Representative VOPP1 IRC transcripts are set forth in SEQ ID NO: 71, 73, 75, 77, 79, 81, 83, 85, 87, 89, 91 and 93, and representative VOPP1 IRC polypeptides are set forth in SEQ ID NO: 72, 74, 76, 78, 80, 82, 84, 86, 88, 90, 92 and 94. In still other illustrative examples, the ACRC IRC marker expression product comprises a nucleotide sequence corresponding to one or both exons selected from ACRC exons 3 and 5, or amino acid sequence(s) encoded by one or both of those exons. Non-limiting ACRC IRC transcripts are set forth in SEQ ID NO: 95 and 97, and non-limiting ACRC IRC polypeptides are set forth in SEQ ID NO: 96 and 98. In still other illustrative examples, the GALNT10 IRC marker expression product comprises a nucleotide sequence corresponding to GALNT10 exon 6 or an amino acid sequence encoded by that exon. Representative GALNT10 IRC transcripts are set forth in SEQ ID NO: 99 and 101, and representative GALNT10 IRC polypeptides are set forth in SEQ ID NO: 100 and 102. In still other illustrative examples, the AC1385341 IRC marker expression product comprises a nucleotide sequence corresponding to AC1385341 exon 3 or an amino acid sequence encoded by that exon. Representative AC1385341 IRC transcripts are set forth in SEQ ID NO: 103, 105, 107, 109, 111, 113, 115, 117, 119, 121 and 123, and representative AC1385341 IRC polypeptides are set forth in SEQ ID NO: 104, 106, 108, 110, 112, 114, 116, 118, 120, 122 and 124. In still other illustrative examples, the MED12L IRC marker expression product comprises a nucleotide sequence corresponding to MED12L exon 17 or an amino acid sequence encoded by that exon. Representative MED12L IRC transcripts are set forth in SEQ ID NO: 125 and 127, and representative MED12L IRC polypeptides are set forth in SEQ ID NO: 126 and 128. In still other illustrative examples, the RHBDF2 IRC marker expression product comprises a nucleotide sequence corresponding to an exon selected from RHBDF2 exons 6, 9, 10, 11, 14, 17, 18 or 19, or an amino acid sequence encoded by that exon. Representative RHBDF2 IRC transcripts are set forth in SEQ ID NO: 129, 131 and 133 and representative RHBDF2 IRC polypeptides are set forth in SEQ ID NO: 130, 132 and 134. In still other illustrative examples, the KLHL6 IRC marker expression product comprises a nucleotide sequence corresponding to KLHL6 exon 7 or an amino acid sequence encoded by that exon. A representative KLHL6 IRC transcript is set forth in SEQ ID. NO: 135, and a representative KLHL6 IRC polypeptide is set forth in SEQ ID NO: 136. In other illustrative examples, the TEP1 IRC marker expression product comprises a nucleotide sequence corresponding to TEP1 exon 49, or an amino acid sequence encoded by that exon. Non-limiting TEP1 IRC transcripts are set forth in SEQ ID NO: 137 and 139, and non-limiting TEP1 IRC polypeptides are set forth in SEQ ID NO: 138 and 140. In still other illustrative examples, the PIWIL6 IRC marker expression product comprises a nucleotide sequence corresponding to one or both exons selected from PIWIL6 exons 2 and 14, or amino acid sequence(s) encoded by one or both of those exons. Non-limiting PIWIL6 IRC transcripts are set forth in SEQ ID NO: 141 and 143, and non-limiting PIWIL6 IRC polypeptides are set forth in SEQ ID NO: 142 and 144. In still other illustrative examples, the PRR11 IRC marker expression product comprises a nucleotide sequence corresponding to one or both exons selected from PRR11 exons 4 and 5, or amino acid sequence(s) encoded by one or both of those exons. A non-limiting PRR11 IRC transcript is set forth in SEQ ID NO: 145, and a non-limiting PRR11 IRC polypeptide is set forth in SEQ ID NO: 146. In still other illustrative examples, the RRAS IRC marker expression product comprises a nucleotide sequence corresponding to RRAS exon 1 or an amino acid sequence encoded by that exon. A representative BRAS IRC transcript is set forth in SEQ ID NO: 147, and a representative RRAS IRC polypeptide is set forth in SEQ ID NO: 148. In other illustrative examples, the TG IRC marker expression product comprises a nucleotide sequence corresponding to TG exon 6, or an amino acid sequence encoded by that exon. Non-limiting TG IRC transcripts are set forth in SEQ ID NO: 149 and 151, and non-limiting TG IRC polypeptides are set forth in SEQ ID NO: 150 and 152. In other illustrative examples, the ANKDD1A IRC marker expression product comprises a nucleotide sequence corresponding to ANKDD1A exon 7 or an amino acid sequence encoded by that exon. Non-limiting ANKDD1A IRC transcripts are set forth in SEQ ID NO: 153, 155, 157, 159 and 161 and non-limiting ANKDD1A IRC polypeptides are set forth in SEQ ID NO:154, 156, 158, 160 and 162. In other illustrative examples, the GABRR2 IRC marker expression product comprises a nucleotide sequence corresponding to an exon selected from GABRR2 exons 7, 8 or 9 or an amino acid sequence encoded by that exon. Illustrative GABRR2 IRC transcripts are set forth in SEQ ID NO: 163 and 165 and illustrative GABRR2 IRC polypeptides are set forth in SEQ ID NO: 164 and 166. In still other illustrative examples, the MOV10 IRC marker expression product comprises a nucleotide sequence corresponding to MOV10 exon 6 or an amino acid sequence encoded by that exon. Representative MOV10 IRC transcripts are set forth in SEQ ID NO: 167, 169, 171, 173, 175 and 177, and representative MOV10 IRC polypeptides are set forth in SEQ ID NO: 168, 170, 172, 174, 176 and 178. In still other illustrative examples, the SLAMF7 IRC marker expression product comprises a nucleotide sequence corresponding to an exon selected from SLAMF7 exons 2, 3, 4 or 5, or an amino acid sequence encoded by that exon. Non-limiting SLAMF7 IRC transcripts are set forth in SEQ ID NO: 179, 181, 183, 185, 187, 189, 191 and 193 and non-limiting SLAMF7 IRC polypeptides are set forth in SEQ ID NO: 180, 182, 184, 186, 188, 190, 192, and 194. In still other illustrative examples, the PDCILG2 IRC marker expression product comprises a nucleotide sequence corresponding to one or both exons selected from PDCILG2 exons 1 and 2, or amino acid sequence(s) encoded by one or both of those exons. Non-limiting PDCILG2 IRC transcripts are set forth in SEQ ID NO: 195 and 197, and non-limiting PDCILG2 IRC polypeptides are set forth in SEQ ID NO: 196 and 198. In still other illustrative examples, the GCH1 IRC marker expression product comprises a nucleotide sequence corresponding to GCH1 exon 2 or an amino acid sequence encoded by that exon. Representative GCH1 IRC transcripts are set forth in SEQ ID NO: 199, 201, 203 and 205, and representative GCH1 IRC polypeptides are set forth in SEQ ID NO: 1200, 202, 204 and 206. Information on each gene in LIST B exhibiting splice variation and ability to determine the presence or risk of sepsis versus post-surgical inflammation, the corresponding sequence numbers, log fold changes (and direction), T adjusted P value, relevant exon number and number of possible exons in the gene, is presented in Table 7.

[0023] In some embodiments, the presence or risk of development of sepsis is determined by detecting in the subject an increase in the level of at least 1, 2, 3, 4, 5, 6, 7, 8, 9, 10, 11, 12, 13, 14, 15, 16, 17, 18, 19, 20, 21, 22, 23, 24, 25, 26, 27, 28, 29, 30, 31, 32, 33, 34, 35, 36, 37, 38, 39, 40, 41, 42, 43, 44, 45, 46, 47, 48, 49, 50, 51, 52, 53, 54, 55, 56, 57, 58, 59, 60, 61, 62, 63, 64, 65, 66, 67, 68, 69, 70, 71, 72, 73, 74, 75, 76, 77, 78, 79, 80, 81, 82, 83, 84, 85, 86, 87, 88, 89, 90, 91, 92, 93, 94, 95, 96, 97, 98, 99, 100, 101, 102, 103, 104, 105, 106, 107, 108, 109, 110, 111, 112, 113, 114, 115, 116, 117, 118, 119, 120, 121, 122, 123, 124, 125, 126, 127, 128, 129, 130, 131, 132, 133, 134, 135, 136, 137, 138, 139, 140, 141, 142, 143, 144, 145, 146, 147, 148, 149, 150, 151, 152, 153, 154, 155 or 156 IRC marker expression product(s) from at least one multi-transcript-producing gene selected from the group consisting of: RELT, ACP2, FCHSD1, CLPB, SLC39A 1, TBC1D2B, APH1A, DDOST, BAK1, SLC25A25A, COQ2, FANCA, PIWIL4, ZNF335, TEX261, GABRR2, VOPP1, TTL, CES2, GALNT10, C1ORF91, AMBRA1 and SCRN1 (hereafter referred to as “LIST C”), as compared to the level of a corresponding IRC marker expression product in an inSIRS-positive control subject. In some embodiments, the presence or risk of development of inSIRS is determined by detecting in the subject a decrease in the level of at least 1, 2, 3, 4, 5, 6, 7, 8, 9, 10, 11, 12, 13, 14, 15, 16, 17, 18, 19, 20, 21, 22, 23, 24, 25, 26, 27, 28, 29, 30, 31, 32, 33, 34, 35, 36, 37, 38, 39, 40, 41, 42, 43, 44, 45, 46, 47, 48, 49, 50, 51, 52, 53, 54, 55, 56, 57, 58, 59, 60, 61, 62, 63, 64, 65, 66, 67, 68, 69, 70, 71, 72, 73, 74, 75, 76, 77, 78, 79, 80, 81, 82, 83, 84, 85, 86, 87, 88, 89, 90, 91, 92, 93, 94, 95, 96, 97, 98, 99, 100, 101, 102, 103, 104, 105, 106, 107, 108, 109, 110, 111, 112, 113, 114, 115, 116, 117, 118, 119, 120, 121, 122, 123, 124, 125, 126, 127, 128, 129, 130, 131, 132, 133, 134, 135, 136, 137, 138, 139, 140, 141, 142, 143, 144, 145, 146, 147, 148, 149, 150, 151, 152, 153, 154, 155 or 156 IRC marker expression(s) product from at least one multi-transcript-producing gene selected from the group consisting of: RELT, ACP2, FCHSD1, CLPB, SLC39A1, TBC1D2B, APH1A, DDOST, BAK1, SLC25A25A, COQ2, FANCA, PIWIL4, ZNF335, TEX261, GABRR2, VOPP1, TTL, CES2, GALNT10, C1ORF91, AMBRA1 and SCRN1 (i.e., LIST C), as compared to the level of the corresponding IRC marker expression product in a sepsis-positive control subject. In illustrative examples of these embodiments, the RELT IRC marker expression product comprises a nucleotide sequence corresponding to RELT exon 4 or an amino acid sequence encoded by that exon. Illustrative RELT IRC transcripts are set forth in SEQ ID NO: 307 and 209 and illustrative RELT IRC polypeptides are set forth in SEQ ID NO: 208 and 210. In other illustrative examples, the ACP2 IRC marker expression product comprises a nucleotide sequence corresponding to ACP2 exon 7 or an amino acid sequence encoded by that exon. A non-limiting ACP2 IRC transcript is set forth in SEQ ID NO: 211 and a non-limiting ACP2 IRC polypeptide is set forth in SEQ ID NO: 212. In still other illustrative examples, the FCHSD1 IRC marker expression product comprises a nucleotide sequence corresponding to FCHSD1 exon 14 or an amino acid sequence encoded by that exon. Illustrative FCHSD1 IRC transcripts are set forth in SEQ ID NO: 213 and 215 and illustrative FCHSD1 IRC polypeptides are set forth in SEQ ID NO: 214 and 216. In still other illustrative examples, the CLPB IRC marker expression product comprises a nucleotide sequence corresponding to CLPB exon 10 or an amino acid sequence encoded by that exon. Representative CLPB IRC transcripts are set forth in SEQ ID NO: 217, 219 and 221 and representative CLPB IRC polypeptides are set forth in SEQ ID NO: 218, 220 and 222. In other illustrative examples, the SLC39A11 IRC marker expression product comprises a nucleotide sequence corresponding to SLC39A11 exon 2 or an amino acid sequence encoded by that exon. A non-limiting SLC39A11 IRC transcript is set forth in SEQ ID NO: 223 and a non-limiting SLC39A11 IRC polypeptide is set forth in SEQ ID NO: 224. In other illustrative examples, the TBC1D2B IRC marker expression product comprises a nucleotide sequence corresponding to TBC1D2B exon 13 or an amino acid sequence encoded by that exon. Illustrative TBC1D2B IRC transcripts are set forth in SEQ ID NO: 225, 227 and 229 and illustrative TBC1D2B IRC polypeptides are set forth in SEQ ID NO: 226, 228 and 230. In still other illustrative examples, the APH1A IRC marker expression product comprises a nucleotide sequence corresponding to APH1A exon 1 or an amino acid sequence encoded by that exon. Illustrative APH1A IRC transcripts are set forth in SEQ ID NO: 231, 233, 235, 237, 239 and 241 and illustrative APH1A IRC polypeptides are set forth in SEQ ID NO: 232, 234, 236, 238, 240 and 242. In other illustrative examples, the DDOST IRC marker expression product comprises a nucleotide sequence corresponding to DDOST exon 2 or an amino acid sequence encoded by that exon. A non-limiting DDOST IRC transcript is set forth in SEQ ID NO: 243 and a non-limiting DDOST IRC polypeptide is set forth in SEQ ID NO: 244. In still other illustrative examples, the BAK1 IRC marker expression product comprises a nucleotide sequence corresponding to BAK1 exon 7 or an amino acid sequence encoded by that exon. Illustrative BAK1 IRC transcripts are set forth in SEQ ID NO: 245 and 247 and illustrative BAK1 IRC polypeptides are set forth in SEQ ID NO: 246 and 248. In still other illustrative examples, the SLC25A25A IRC marker expression product comprises a nucleotide sequence corresponding to SLC25A25A exon 10 or an amino acid sequence encoded by that exon. Illustrative SLC25A25A IRC transcripts are set forth in SEQ ID NO: 249, 251, 253, 255, 257, 259 and 261 and illustrative. SLC25A25A IRC polypeptides are set forth in SEQ ID NO: 250, 252, 254, 256, 258, 260 and 262. In still other illustrative examples, the COQ1 IRC marker expression product comprises a nucleotide sequence corresponding to COQ1 exon 1 or an amino acid sequence encoded by that exon. Illustrative COQ1 IRC transcripts are set forth in SEQ ID NO: 263, 265 and 267 and illustrative COQ1 IRC polypeptides are set forth in SEQ ID NO: 264, 266 and 268. In still other illustrative examples, the FANCA IRC marker expression product comprises a nucleotide sequence corresponding to FANCA exon 35 or an amino acid sequence encoded by that exon. Illustrative FANCA IRC transcripts are set forth in SEQ ID NO: 269 and 271 and illustrative FANCA IRC polypeptides are set forth in SEQ ID NO: 270 and 272. In other illustrative examples, the PIWIL4 IRC marker expression product comprises a nucleotide sequence corresponding to one or both exons selected from PIWIL4 exons 2 and 14, or amino acid(s) sequence encoded by one or both of those exons. Non-limiting PIWIL4 IRC transcripts are set forth in SEQ ID NO: 273 and 275 and non-limiting PIWIL4 IRC polypeptides are set forth in SEQ ID NO: 274 and 276. In still other illustrative examples, the ZNF335 IRC marker expression product comprises a nucleotide sequence corresponding to ZNF335 exon 5 or an amino acid sequence encoded by that exon. Illustrative ZNF335 IRC transcripts are set forth in SEQ ID NO: 277, 279 and 281 and illustrative ZNF335 IRC polypeptides are set forth in SEQ ID NO: 278, 280 and 282. In still other illustrative examples, the TEX261 IRC marker expression product comprises a nucleotide sequence corresponding to TEX261 exon 3 or an amino acid sequence encoded by that exon. Illustrative TEX261 IRC transcripts are set forth in SEQ ID NO: 283 and 285 and illustrative TEX261 IRC polypeptides are set forth in SEQ ID NO: 284 and 286. In other illustrative examples, the GABRR2 IRC marker expression product comprises a nucleotide sequence corresponding to 1, 2 or each of the exons selected from GABRR2 exons 7, 8 and 9, or amino acid sequence(s) encoded by 1, 2 or each of those exons. Non-limiting GABRR2 IRC transcripts are set forth in SEQ ID NO: 287 and 289 and non-limiting GABRR2 IRC polypeptides are set forth in SEQ ID NO: 288 and 290. In still other illustrative examples, the VOPP1 IRC marker expression product comprises a nucleotide sequence corresponding to VOPP1 exon 3 or an amino acid sequence encoded by that exon. Illustrative VOPP1 IRC transcripts are set forth in SEQ ID NO: 291, 293, 295, 297, 299, 301, 303, 305, 307, 309, 311 and 313 and illustrative VOPP1 IRC polypeptides are set forth in SEQ ID NO: 292, 294, 296, 298, 300, 302, 304, 306, 308, 310, 312 and 314. In other illustrative examples, the TTL IRC marker expression product comprises a nucleotide sequence corresponding to TTL exon 7 or an amino acid sequence encoded by that exon. A non-limiting TTL IRC transcript is set forth in SEQ ID NO: 315 and a non-limiting TTL IRC polypeptide is set forth in SEQ ID NO: 316. In other illustrative examples, the CES2 IRC marker expression product comprises a nucleotide sequence corresponding to CES2 exon 1 or an amino acid sequence encoded by that exon. Illustrative CES2 IRC transcripts are set forth in SEQ ID NO: 317 and 319 and illustrative CES2 IRC polypeptides are set forth in SEQ ID NO: 318 and 320. In still other illustrative examples, the GALNT10 IRC marker expression product comprises a nucleotide sequence corresponding to GALNT10 exon 6 or an amino acid sequence encoded by that exon. Illustrative GALNT10 IRC transcripts are set forth in SEQ ID NO: 321 and 323 and illustrative GALNT10 IRC polypeptides are set forth in SEQ ID NO: 322 and 324. In still other illustrative examples, the C1ORF91 IRC marker expression product comprises a nucleotide sequence corresponding to C1ORF91 exon 2 or an amino acid sequence encoded by that exon. Illustrative C1ORF91 IRC transcripts are set forth in SEQ ID NO: 325, 327, 329, 331, 333 and 335 and illustrative C1ORF91 IRC polypeptides are set forth in SEQ ID NO: 326, 328, 330, 332, 334 and 336. In other illustrative examples, the AMBRA1 IRC marker expression product comprises a nucleotide sequence corresponding to an exon selected from AMBRA1 exons 2 and 4, or an amino acid sequence encoded by that exon. Non-limiting AMBRA1 IRC transcripts are set forth in SEQ ID NO: 337, 339, 341, 343, 345 and 347 and non-limiting AMBRA1 IRC polypeptides are set forth in SEQ ID NO: 338, 340, 342, 344, 346 and 348. In still other illustrative examples, the SCRN1 IRC marker expression product comprises a nucleotide sequence corresponding to SCRN1 exon 5 or an amino acid sequence encoded by that exon. Illustrative SCRN1 IRC transcripts are set forth in SEQ ID NO: 349, 351, 353, 355, 357, 359 and 361 and illustrative SCRN1 IRC polypeptides are set forth in SEQ ID NO: 350, 352, 354, 356, 358, 360 and 362. Information on each gene in LIST C exhibiting splice variation and ability to determine the presence or risk of sepsis versus post-surgical inflammation, the corresponding sequence numbers, log fold changes (and direction), T adjusted P value, relevant exon number and number of possible exons in the gene, is presented in Table 8.

[0024] In some embodiments, the presence or risk of development of sepsis is determined by detecting in the subject an decrease in the level of at least 1, 2, 3, 4, 5, 6, 7, 8, 9, 10, 11, 12, 13, 14, 15, 16, 17, 18, 19 or 20 IRC marker expression product(s) from at least one multi-transcript-producing gene selected from the group consisting of: GRINL1A and KATNAL2 (hereafter referred to as “LIST D”), as compared to the level of a corresponding IRC marker expression product in an inSIRS-positive control subject. In some embodiments, the presence or risk of development of inSIRS is determined by detecting in the subject a increase in the level of at least 1, 2, 3, 4, 5, 6, 7, 8, 9, 10, 11, 12, 13, 14, 15, 16, 17, 18, 19 or 20 IRC marker expression(s) product from at least one multi-transcript-producing gene selected from the group consisting of: GRINL1A and KATNAL2 (i.e., LIST D), as compared to the level of the corresponding IRC marker expression product in a sepsis-positive control subject. In illustrative examples of these embodiments, the GRINL1 IRC marker expression product comprises a nucleotide sequence corresponding to an exon selected from GRINL1 exon 5, or an amino acid sequence encoded by that exon. Non-limiting GRINL1 IRC transcripts are set forth in SEQ ID NO: 363, 365, 367, 369, 371, 373, 375 and 377 and non-limiting GRINL1 IRC polypeptides are set forth in SEQ ID NO:364, 366, 368, 370, 372, 374, 376 and 378. In other illustrative examples, the KATNAL2 IRC marker expression product comprises a nucleotide sequence corresponding to KATNAL2 exon 3 or an amino acid sequence encoded by that exon. Illustrative KATNAL2 IRC transcripts are set forth in SEQ ID NO: 379 and 381 and illustrative KATNAL2 IRC polypeptides are set forth in SEQ ID NO: 380 and 382. Information on each gene in LIST D exhibiting splice variation and ability to determine the presence or risk of sepsis versus post-surgical inflammation, the corresponding sequence numbers, log fold changes (and direction), T adjusted P value, relevant exon number and number of possible exons in the gene, is presented in Table 8.

[0025] In some embodiments, the presence or risk of development of inSIRS is determined by detecting in the subject an increase in the level of at least 1, 2, 3, 4, 5, 6, 7, 8, 9, 10, 11, 12, 13, 14, 15, 16, 17, 18, 19, 20, 21, 22, 23, 24, 25, 26, 27, 28, 29, 30, 31, 32, 33, 34, 35, 36, 37 or 38, IRC marker expression product(s) from at least one multi-transcript-producing gene selected from the group consisting of: PDCD1LG2, KATNAL2, GRINL1A, ACRC, TG, and ASPHD2 (hereafter referred to as “LIST E”), as compared to the level of a corresponding IRC marker expression product in a post-surgical inflammation-positive control subject. In other embodiments, the presence or risk of development of post-surgical inflammation is determined by detecting in the subject a decrease in the level of at least 1, 2, 3, 4, 5, 6, 7, 8, 9, 10, 11, 12, 13, 14, 15, 16, 17, 18, 19, 20, 21, 22, 23, 24, 25, 26, 27, 28, 29, 30, 31, 32, 33, 34, 35, 36, 37 or 38 IRC marker expression product(s) from at least one multi-transcript-producing gene selected from the group consisting of: PDCD1LG2, KATNAL2, GRINL1A, ACRC, TG, and ASPHD2 (i.e., LIST E), as compared to the level of a corresponding IRC marker expression product in an inSIRS-positive control subject. In illustrative examples of these embodiments, the PDCD1LG2 IRC marker expression product comprises a nucleotide sequence corresponding to PDCD1LG2 exon 1, 2 or an amino acid sequence encoded by those exons. Non-limiting PDCD1LG2 IRC transcripts are set forth in SEQ ID NO: 383 and 385 and non-limiting PDCD1LG21 IRC polypeptides are set forth in SEQ ID NO: 384 and 386. In other illustrative examples, the KATNAL2 IRC marker expression product comprises a nucleotide sequence corresponding to KATNAL2 exon 3 or an amino acid sequence encoded by that exon. Illustrative KATNAL2 IRC transcripts are set forth in SEQ ID NO: 387 and 389 and illustrative KATNAL2 IRC polypeptides are set forth in SEQ ID NO: 388 and 390. In other illustrative examples, the GRINL1 IRC marker expression product comprises a nucleotide sequence corresponding to an exon selected from GRINL1 exon 5, or an amino acid sequence encoded by that exon. Non-limiting GRINL1 IRC transcripts are set forth in SEQ ID NO: 391, 393, 395, 397, 399, 401, 403 and 405 and non-limiting GRINL1 IRC polypeptides are set forth in SEQ ID NO:392, 394, 396, 398, 400, 402, 404 and 406. n still other illustrative examples, the ACRC IRC marker expression product comprises a nucleotide sequence corresponding to one or both exons selected from ACRC exons 3 and 5, or amino acid sequence(s) encoded by one or both of those exons. Non-limiting ACRC IRC transcripts are set forth in SEQ ID NO: 407 and 409, and non-limiting ACRC IRC polypeptides are set forth in SEQ ID NO: 408 and 410. In other illustrative examples, the TG IRC marker expression product comprises a nucleotide sequence corresponding to TG exon 6, or an amino acid sequence encoded by that exon. Non-limiting TG IRC transcripts are set forth in SEQ ID NO: 411 and 413, and non-limiting TG IRC polypeptides are set forth in SEQ ID NO: 412 and 414. n still other illustrative examples, the ASPHD2 IRC marker expression product comprises a nucleotide sequence corresponding to ASPHD2 exon 4 or an amino acid sequence encoded by that exon. Representative ASPHD2 IRC transcripts are set forth in SEQ ID NO: 415, 417 and 419, and representative ASPHD2 IRC polypeptides are set forth in SEQ ID NO: 416, 418 and 420. Information on each gene in LIST E exhibiting splice variation and ability to determine the presence or risk of sepsis versus post-surgical inflammation, the corresponding sequence numbers, log fold changes (and direction), T adjusted P value, relevant exon number and number of possible exons in the gene, is presented in Table 9.

[0026] In some embodiments, the presence or risk of development of inSIRS is determined by detecting in the subject a decrease in the level of 1, 2, 3, 4, 5, 6, 7, 8, 9, 10, 11, 12, 13, 14, 15, 16, 17, 18, 19, 20, 21, 22, 23, 24, 25, 26, 27, 28, 29, 30, 31, 32, 33, 34, 35, 36, 37, 38, 39, 40, 41, 42, 43, 44, 45, 46, 47, 48, 49, 50, 51, 52, 53, 54, 55, 56, 57, 58, 59, 60, 61, 62, 63, 64, 65, 66, 67, 68, 69, 70, 71, 72, 73, 74, 75, 76, 77, 78, 79, 80, 81, 82, 83, 84, 85, 86, 87, 88, 89, 90, 91, 92, 93, 94, 95 or 96 IRC marker expression product(s) from at least one multi-transcript-producing gene selected from the group consisting of CUL7, BTNL8/3, PANX2, C1ORF91, ZNF335, MGRN1, GAA, CDK5R1, SNTB2, CLPB, ADAM19, SLC36A1, FKBP9, NDST1, HIPK2 and CEACAM4 (hereafter referred to as “LIST F”) as compared to the level of the corresponding IRC marker gene(s) in a post-surgical inflammation-positive control subject. In other embodiments, the presence or risk of development of post-surgical inflammation is determined by detecting in the subject an increase in the level of 1, 2, 3, 4, 5, 6, 7, 8, 9, 10, 11, 12, 13, 14, 15, 16, 17, 18, 19, 20, 21, 22, 23, 24, 25, 26, 27, 28, 29, 30, 31, 32, 33, 34, 35, 36, 37, 38, 39, 40, 41, 42, 43, 44, 45, 46, 47, 48, 49, 50, 51, 52, 53, 54, 55, 56, 57, 58, 59, 60, 61, 62, 63, 64, 65, 66, 67, 68, 69, 70, 71, 72, 73, 74, 75, 76, 77, 78, 79, 80, 81, 82, 83, 84, 85, 86, 87, 88, 89, 90, 91, 92, 93, 94, 95 or 96 IRC marker expression product(s) from at least one multi-transcript-producing gene selected from the group consisting of: CUL7, BTNL8/3, PANX2, C1ORF91, ZNF335, MGRN1, GAA, CDK5R1, SNTB2, CLPB, ADAM19, SLC36A1, FKBP9, NDST1, HIPK2 and CEACAM4 (i.e., LIST F) as compared to the level of the corresponding IRC marker gene(s) in an inSIRS-positive control subject. In non-limiting examples of these embodiments, the CUL7 IRC marker expression product comprises a nucleotide sequence corresponding to CUL7 exon 5 or an amino acid sequence encoded by that exon. An illustrative CUL7 IRC transcript is set forth in SEQ ID NO: 421 and an illustrative CUL7 IRC polypeptide is set forth in SEQ ID NO: 422. In illustrative examples, the HIPK2 IRC marker expression product comprises a nucleotide sequence corresponding to HIPK2 exon 11 or an amino acid sequence encoded by that exon. In still other illustrative examples, the BTNL8/3 IRC marker expression product comprises a nucleotide sequence corresponding to BTNL8/3 exon 6, or an amino acid sequence encoded by that exon. Representative BTNL8/3 IRC transcripts are set forth in SEQ ID NO: 423, 425, 427, 429, 431 and 433, and representative BTNL8/3 IRC polypeptides are set forth in SEQ ID NO: 424, 426, 428, 430, 432 and 434. In other illustrative examples, the PANX2 IRC marker expression product comprises a nucleotide sequence corresponding to an exon selected from PANX2 exon 1 and exon 2, or an amino acid sequence encoded by that exon. Illustrative PANX2 IRC transcripts are set forth in SEQ ID NO: 435, 437 and 439 and illustrative PANX2 IRC polypeptides are set forth In SEQ ID NO: 436, 438 and 440. In still other illustrative examples, the C1 ORF91 IRC marker expression product comprises a nucleotide sequence corresponding to C1ORF91 exon 2 or an amino acid sequence encoded by that exon. Illustrative C1ORF91 IRC transcripts are set forth in SEQ ID NO: 441, 443, 445, 447, 449 and 451 and illustrative C1ORF91 IRC polypeptides are set forth in SEQ ID NO: 442, 444, 446, 448, 450 and 452. In still other illustrative examples, the ZNF335 IRC marker expression product comprises a nucleotide sequence corresponding to ZNF335 exon 5 or an amino acid sequence encoded by that exon. Illustrative ZNF335 IRC transcripts are set forth in SEQ ID NO: 453, 455 and 457 and illustrative ZNF335 IRC polypeptides are set forth in SEQ ID NO: 454, 456 and 458. In still other illustrative examples, the MGRN1 IRC marker expression product comprises a nucleotide sequence corresponding to MGRN1 exon 4 or an amino acid sequence encoded by that exon. Illustrative MGRN1 IRC transcripts are set forth in SEQ ID NO: 459, 461 and 463 and illustrative MGRN1 IRC polypeptides are set forth in SEQ ID NO: 460, 462 and 464. In still other illustrative examples, the GAA IRC marker expression product comprises a nucleotide sequence corresponding to GAA exon 3 or an amino acid sequence encoded by that exon. Illustrative GAA IRC transcripts are set forth in SEQ ID NO: 465, 467 and 469 and illustrative GAA IRC polypeptides are set forth in SEQ ID NO: 466, 468 and 470. In still other illustrative examples, the CDK5R1 IRC marker expression product comprises a nucleotide sequence corresponding to CDK5R1 exon 2 or an amino acid sequence encoded by that exon. An illustrative CDK5R1 IRC transcript is set forth in SEQ ID NO: 471, and an illustrative CDK5R1 IRC polypeptide is set forth in SEQ ID NO: 472. In still other illustrative examples, the SNTB2 IRC marker expression product comprises a nucleotide sequence corresponding to SNTB2 exon 4 or an amino acid sequence encoded by that exon. An illustrative SNTB2 IRC transcript is set forth in SEQ ID NO: 473, and an illustrative SNTB2 IRC polypeptide is set forth in SEQ ID NO: 474. In still other illustrative examples, the CLPB IRC marker expression product comprises a nucleotide sequence corresponding to CLPB exon 10, or an amino acid sequence encoded by that exon. Representative CLPB IRC transcripts are set forth in SEQ ID NO: 475, 477 and 479 and representative CLPB IRC polypeptides are set forth in SEQ ID NO: 476, 478 and 480. In still other illustrative examples, the ADAM19 IRC marker expression product comprises a nucleotide sequence corresponding to ADAM19 exon 10, or an amino acid sequence encoded by that exon. Representative ADAM19 IRC transcripts are set forth in SEQ ID NO: 481, 483, 485 and 487, and representative ADAM19 IRC polypeptides are set forth in SEQ ID NO: 482, 484, 486 and 488. In still other illustrative examples, the SLC36A1 IRC marker expression product comprises a nucleotide sequence corresponding to SLC36A1 exon 5, or an amino acid sequence encoded by that exon. Representative SLC36A1 IRC transcripts are set forth in SEQ ID NO: 489, 491, 493 and 495, and representative SLC36A1 IRC polypeptides are set forth in SEQ ID NO: 490, 492, 494 and 496. In still other illustrative examples, the FKBP9 IRC marker expression product comprises a nucleotide sequence corresponding to FKBP9 exon 10, or amino acid sequence(s) encoded by that exon. Representative FKBP9 IRC transcripts are set forth in SEQ ID NO: 497 and 499 and representative FKBP9 IRC polypeptides are set forth in SEQ ID NO: 498 and 500. In other illustrative examples, the CEACAM4 IRC marker expression product comprises a nucleotide sequence corresponding to 1, 2 or each of the exons selected from CEACAM4 exon 5, exon 7 and exon 23, or amino acid sequence(s) encoded by 1, 2 each of those exons. Illustrative CEACAM4 IRC transcripts are set forth in SEQ ID NO: 501 and 503, and illustrative CEACAM4 IRC polypeptides are set forth in SEQ ID NO: 502 and 504. Illustrative HIPK2 IRC transcripts are set forth in SEQ ID NO: 505, 507, 509, and 511 and illustrative HIPK2 IRC polypeptides are set forth in SEQ ID NO: 506, 508, 510 and 512. Information on each gene in LIST F exhibiting splice variation and ability to determine the presence or risk of sepsis versus post-surgical inflammation, the corresponding sequence numbers, log fold changes (and direction), T adjusted P value, relevant exon number and number of possible exons in the gene, is presented in Table 9.

[0027] In some embodiments, the methods comprise measuring the level of at least 1, 2, 3, 4, 5, 6, 7, 8, 9, 10, 11, 12, 13, 14, 15, 16, 17, 18, 19, 20, 21, 22, 23 or 24 individual IRC expression products of each of 1, 2, 3, 4, 5, 6, 7, 8, 9, 10, 11, 12, 13, 14, 15, 16, 17, 18, 19, 20, 21, 22, 23, 24, 25, 26, 27, 28, 29, 30, 31, 32, 33, 34, 35, 36, 37, 38, 39, 40, 41, 42, 43, 44, 45, 46, 47, 48, 49, 50, 51, 52, 53, 54, 55, 56 or 57 multi-transcript-producing genes (also referred to herein as “IRC multi-transcript-producing genes”). For example, the methods may comprise measuring the level of 1, 2, 3, 4, 5, 6, 7, 8, 9, 10, 11 or 12 IRC marker polynucleotides from an IRC multi-transcript-producing gene selected from: ANKDD1A, GABRR2, OTX1, PANX2, RHBDF2, SLAMF7, AMBRA1, CES2, CLPB, HIPK2, C1ORF91, NDST1, SLC36A1, ADAM19, CUL7, TG, PDCD1LG2, GRINL1A, MGRN1, SNTB2, CDK5R1, GAA, KATNAL2, CEACAM4, ZNF335, ASPHD2, ACRC, BTNL8, MOV10, MED12L, KLHL6, PDLIM5, GALNT10, SCRN1, VOPP1, FKBP9, KIF27, PIWIL4, TEP1, GCH1, PRR11, CDH2, PPM1N, RRAS, DDOST, APH1A, TTL, TEX261, COQ2, FCHSD1, BAK1, SLC25A25, RELT, ACP2, TBC1D2B, FANCA or SLC39A11, either alone or in combination with as much as 1, 2, 3, 4, 5, 6, 7, 8, 9, 10, 11 or 12 individual IRC marker polynucleotides from each of 56, 55, 54, 53, 52, 51, 50, 49, 48, 47, 46, 45, 44, 43, 42, 41, 40, 39, 38, 37, 36, 35, 34, 33, 32, 31, 30, 29, 28, 27, 26, 25, 24, 23, 22, 21, 19, 18, 17, 16, 15, 14, 13, 12, 11, 10, 9, 8, 7, 6, 5, 4, 3 or 2 IRC multi-transcript-producing genes or from 1 other IRC multi-transcript-producing gene. In other embodiments, the methods comprise measuring the level of 1, 2, 3, 4, 5, 6, 7, 8, 9, 10, 11 or 12 IRC marker polypeptides from an IRC multi-transcript-producing gene as defined herein, either alone or in combination with as much as 1, 2, 3, 4, 5, 6, 7, 8, 9, 10, 11 or 12 individual IRC marker polypeptides expressed from each of 56, 55, 54, 53, 52, 51, 50, 49, 48, 47, 46, 45, 44, 43, 42, 41, 40, 39, 38, 37, 36, 35, 34, 33, 32, 31, 30, 29, 28, 27, 26, 25, 24, 23, 22, 21, 19, 18, 17, 16, 15, 14, 13, 12, 11, 10, 9, 8, 7, 6, 5, 4, 3, 2 other IRC multi-transcript-producing genes or from 1 other IRC multi-transcript-producing gene.

[0028] In illustrative examples of this type, the methods further comprise detecting the level of at least one IRC marker expression product from two or more of LISTS A, B, C, D, E and F. In specific embodiments, the methods comprise detecting the level of at least one IRC marker expression product from one of the lists and the level of at least one different IRC marker expression product from another of the lists. In illustrative examples of this type, the methods comprise detecting the level of at least one IRC marker expression product from LIST A and the level of at least one other IRC marker expression product from LIST B. In other illustrative examples, the methods comprise detecting the level of at least one IRC marker expression product from LIST A and the level of at least one other IRC marker expression product from LIST C. In still other illustrative examples, the methods comprise detecting the level of at least one IRC marker expression product from LIST A and the level of at least one other IRC marker expression product from LIST D. In still other illustrative examples, the methods comprise detecting the level of at least one IRC marker expression product from LIST A and the level of at least one other IRC marker expression product from LIST E. In still other illustrative examples, the methods comprise detecting the level of at least one IRC marker expression product from LIST A and the level of at least one other IRC marker expression product from LIST F. In other illustrative examples, the methods comprise detecting the level of at least one IRC marker expression product from LIST B and the level of at least one other IRC marker expression product from LIST C. In still other illustrative examples, the methods comprise detecting the level of at least one IRC marker expression product from LIST B and the level of at least one other IRC marker expression product from LIST D. In still other illustrative examples, the methods comprise detecting the level of at least one IRC marker expression product from LIST B and the level of at least one other IRC marker expression product from LIST E. In still other illustrative examples, the methods comprise detecting the level of at least one IRC marker expression product from LIST B and the level of at least one other IRC marker expression product from LIST F. In other illustrative examples, the methods comprise detecting the level of at least one IRC marker expression product from LIST C and the level of at least one other IRC marker expression product from LIST D. In still other illustrative examples, the methods comprise detecting the level of at least one IRC marker expression product from LIST C and the level of at least one other IRC marker expression product from LIST E. In still other illustrative examples, the methods comprise detecting the level of at least one IRC marker expression product from LIST C and the level of at least one other IRC marker expression product from LIST F. In still other illustrative examples, the methods comprise detecting the level of at least one IRC marker expression product from LIST D and the level of at least one other IRC marker expression product from LIST E. In still other illustrative examples, the methods comprise detecting the level of at least one IRC marker expression product from LIST D and the level of at least one other IRC marker expression product from LIST F. In other illustrative examples, the methods comprise detecting the level of at least one IRC marker expression product from LIST E and the level of at least one other IRC marker expression product from LIST F.

[0029] In other embodiments, the methods comprise detecting the level of at least one IRC marker expression product from each of three lists selected from LISTS A, B, C, D, E and F. In illustrative examples of this type, the methods comprise detecting the level of at least one IRC marker expression product from LIST A and the level of at least one other IRC marker expression product from LIST B and the level of at least one other IRC marker expression product from LIST C. In other illustrative examples, the methods comprise detecting the level of at least one IRC marker expression product from LIST A and the level of at least one other IRC marker expression product from LIST B and the level of at least one other IRC marker expression product from LIST D. In still other illustrative examples, the methods comprise detecting the level of at least one IRC marker expression product from LIST A and the level of at least one other IRC marker expression product from LIST B and the level of at least one other IRC marker expression product from LIST E. In still other illustrative examples, the methods comprise detecting the level of at least one IRC marker expression product from LIST A and the level of at least one other IRC marker expression product from LIST B and the level of at least one other IRC marker expression product from LIST F. In other illustrative examples, the methods comprise detecting the level of at least one IRC marker expression product from LIST B and the level of at least one other IRC marker expression product from LIST C and the level of at least one other IRC marker expression product from LIST D. In still other illustrative examples, the methods comprise detecting the level of at least one IRC marker expression product from LIST B and the level of at least one other IRC marker expression product from LIST C and the level of at least one other IRC marker expression product from LIST E. In still other illustrative examples, the methods comprise detecting the level of at least one IRC marker expression product from LIST B and the level of at least one other IRC marker expression product from LIST C and the level of at least one other IRC marker expression product from LIST F. In other illustrative examples, the methods comprise detecting the level of at least one IRC marker expression product from LIST C and the level of at least one other IRC marker expression product from LIST D and the level of at least one other IRC marker expression product from LIST E. In still other illustrative examples, the methods comprise detecting the level of at least one IRC marker expression product from LIST C and the level of at least one other IRC marker expression product from LIST D and the level of at least one other IRC marker expression product from LIST F. In other illustrative examples, the methods comprise detecting the level of at least one IRC marker expression product from LIST D and the level of at least one other IRC marker expression product from LIST E and the level of at least one other IRC marker expression product from LIST F.

[0030] In still other embodiments, the methods comprise detecting the level of at least one IRC marker expression product from each of four lists selected from LISTS A, B, C, D, E and F. In illustrative examples of this type, the methods comprise detecting the level of at least one IRC marker expression product from LIST A and the level of at least one other IRC marker expression product from LIST B and the level of at least one other IRC marker expression product from LIST C and the level of at least one other IRC marker expression product from LIST D. In other illustrative examples, the methods comprise detecting the level of at least one IRC marker expression product from LIST A and the level of at least one other IRC marker expression product from LIST B and the level of at least one other IRC marker expression product from LIST C and the level of at least one other IRC marker expression product from LIST E. In other illustrative examples, the methods comprise detecting the level of at least one IRC marker expression product from LIST A and the level of at least one other IRC marker expression product from LIST B and the level of at least one other IRC marker expression product from LIST C and the level of at least one other IRC marker expression product from LIST F. In other illustrative examples, the methods comprise detecting the level of at least one IRC marker expression product from LIST A and the level of at least one other IRC marker expression product from LIST C and the level of at least one other IRC marker expression product from LIST D and the level of at least one other IRC marker expression product from LIST E. In other illustrative examples, the methods comprise detecting the level of at least one IRC marker expression product from LIST A and the level of at least one other IRC marker expression product from LIST C and the level of at least one other IRC marker expression product from LIST D and the level of at least one other IRC marker expression product from LIST F. In other illustrative examples, the methods comprise detecting the level of at least one IRC marker expression product from LIST A and the level of at least one other IRC marker expression product from LIST D and the level of at least one other IRC marker expression product from LIST E and the level of at least one other IRC marker expression product from LIST F. In still other illustrative examples, the methods comprise detecting the level of at least one IRC marker expression product from LIST B and the level of at least one other IRC marker expression product from LIST C and the level of at least one other IRC marker expression product from LIST D and the level of at least one other IRC marker expression product from LIST E. In still other illustrative examples, the methods comprise detecting the level of at least one IRC marker expression product from LIST B and the level of at least one other IRC marker expression product from LIST C and the level of at least one other IRC marker expression product from LIST D and the level of at least one other IRC marker expression product from LIST F. In other illustrative examples, the methods comprise detecting the level of at least one IRC marker expression product from LIST C and the level of at least one other IRC marker expression product from LIST D and the level of at least one other IRC marker expression product from LIST E and the level of at least one other IRC marker expression product from LIST F. In other illustrative examples, the methods comprise detecting the level of at least one IRC marker expression product from LIST A and the level of at least one other IRC marker expression product from LIST B and the level of at least one other IRC marker expression product from LIST D and the level of at least one other IRC marker expression product from LIST E.

[0031] In still other embodiments, the methods comprise detecting the level of at least one IRC marker expression product from each of five lists selected from LISTS A, B, C, D, E and F. In illustrative examples of this type, the methods comprise detecting the level of at least one IRC marker expression product from LIST A and the level of at least one other IRC marker expression product from LIST B and the level of at least one other IRC marker expression product from LIST C and the level of at least one other IRC marker expression product from LIST D and the level of at least one other IRC marker expression product from LIST E. In other illustrative example's, the methods comprise detecting the level of at least one IRC marker expression product from LIST A and the level of at least one other IRC marker expression product from LIST B and the level of at least one other IRC marker expression product from LIST C and the level of at least one other IRC marker expression product from LIST D and the level of at least one other IRC marker expression product from LIST F. In other illustrative examples, the methods comprise detecting the level of at least one IRC marker expression product from LIST A and the level of at least one other IRC marker expression product from LIST C and the level of at least one other IRC marker expression product from LIST D and the level of at least one other IRC marker expression product from LIST E and the level of at least one other IRC marker expression product from LIST F. In other illustrative examples, the methods comprise detecting the level of at least one IRC marker expression product from LIST B and the level of at least one other IRC marker expression product from LIST C and the level of at least one other IRC marker expression product from LIST D and the level of at least one other IRC marker expression product from LIST E and the level of at least one other IRC marker expression product from LIST F. In other illustrative examples, the methods comprise detecting the level of at least one IRC marker expression product from LIST B and the level of at least one other IRC marker expression product from LIST D and the level of at least one other IRC marker expression product from LIST E and the level of at least one other IRC marker expression product from LIST F and the level of at least one other IRC marker expression product from LIST A.

[0032] In still other embodiments, the methods comprise detecting the level of at least one IRC marker expression product from each of LISTS A, B, C, D, E and F.

[0033] In some embodiments, the methods further comprise diagnosing the absence of sepsis, inSIRS or post surgical inflammation when the measured level or functional activity of the or each IRC expression product is the same as or similar to the measured level or functional activity of the or each corresponding expression product when the control subject is a normal subject. In these embodiments, the measured level or functional activity of an individual IRC expression product varies from the measured level or functional activity of an individual corresponding expression product by no more than about 20%, 18%, 16%, 14%, 12%, 10%, 9%, 8%, 7%, 6%, 5%, 4%, 3%, 2%, 1% or 0.1%, which is hereafter referred to as “normal expression.”

[0034] In certain embodiments, a panel of IRC marker expression products is selected to distinguish sepsis from inSIRS, sepsis from post-surgical inflammation, sepsis from normal, inSIRS from post-surgical inflammation, inSIRS from normal or post-surgical from normal with at least about 70%, 80%, 85%, 90% or 95% sensitivity, suitably in combination with at least about 70% 80%, 85%, 90% or 95% specificity. In some embodiments, both the sensitivity and specificity are at least about 75%, 80%, 85%, 90% or 95%.

[0035] Advantageously, the biological sample comprises blood, especially peripheral blood, which suitably includes leukocytes. Suitably, the expression product is selected from a RNA molecule or a polypeptide. In some embodiments, the expression product is the same as the corresponding expression product. In other embodiments, the expression product is a variant (e.g., an allelic variant) of the corresponding expression product.

[0036] In certain embodiments, the expression product or corresponding expression product is a target RNA (e.g., mRNA) or a DNA copy of the target RNA whose level is measured using at least one nucleic acid probe that hybridists under at least low, medium, or high stringency conditions to the target RNA or to the DNA copy, wherein the nucleic acid probe comprises at least 15 contiguous nucleotides of an IRC marker polynucleotide. In these embodiments, the measured level or abundance of the target RNA or its DNA copy is normalized to the level or abundance of a reference RNA or a DNA copy of the reference RNA that is present in the same sample. Suitably, the nucleic acid probe is immobilized on a solid or semi-solid support. In illustrative examples of this type, the nucleic acid probe forms part of a spatial array of nucleic acid probes. In some embodiments, the level of nucleic acid probe that is bound to the target RNA or to the DNA copy is measured by hybridization (e.g., using a nucleic acid array). In other embodiments, the level of nucleic acid probe that is bound to the target RNA or to the DNA copy is measured by nucleic acid amplification (e.g., using a polymerase chain reaction (PCR)). In still other embodiments, the level of nucleic acid probe that is bound to the target RNA or to the DNA copy is measured by nuclease protection assay.

[0037] In other embodiments, the expression product or corresponding expression product is a target polypeptide whose level is measured using at least one antigen-binding molecule that is immuno-interactive with the target polypeptide. In these embodiments, the measured level of the target polypeptide is normalized to the level of a reference polypeptide that is present in the same sample. Suitably, the antigen-binding molecule is immobilized on a solid or semi-solid support. In illustrative examples of this type, the antigen-binding molecule forms part of a spatial array of antigen-binding molecule. In some embodiments, the level of antigen-binding molecule that is bound to the target polypeptide is measured by immunoassay (e.g., using an ELISA).

[0038] In still other embodiments, the expression product or corresponding expression product is a target polypeptide whose level is measured using at least one substrate for the target polypeptide with which it reacts to produce a reaction product. In these embodiments, the measured functional activity of the target polypeptide is normalized to the functional activity of a reference polypeptide that is present in the same sample.

[0039] In some embodiments, a system is used to perform the diagnostic methods as broadly described above, which suitably comprises at least one end station coupled to a base station. The base station is suitably caused (a) to receive subject data from the end station via a communications network, wherein the subject data represents parameter values corresponding to the measured or normalized level or functional activity of at least one expression product in the biological sample, and (b) to compare the subject data with predetermined data representing the measured or normalized level or functional activity of at least one corresponding expression product in the reference sample to thereby determine any difference in the level or functional activity of the expression product in the biological sample as compared to the level or functional activity of the corresponding expression product in the reference sample. Desirably, the base station is further caused to provide a diagnosis for the presence, absence or degree of post-surgical inflammation, inSIRS or sepsis. In these embodiments, the base station may be further caused to transfer an indication of the diagnosis to the end station via the communications network.

[0040] In another aspect, the invention contemplates use of the methods broadly described above in monitoring, treating or managing post-surgical inflammation or conditions that can lead to sepsis or inSIRS, illustrative examples of which include retained placenta, meningitis, endometriosis, shock, toxic shock (i.e., a sequelae to tampon use), gastroenteritis, appendicitis, ulcerative colitis, Crohn's disease, inflammatory bowel disease, acid gut syndrome, liver failure and cirrhosis, failure of colostrum transfer in neonates, ischemia (in any organ), bacteremia, infections within body cavities such as the peritoneal, pericardial, thecal, and pleural cavities, burns, severe wounds, excessive exercise or stress, hemodialysis, conditions involving intolerable pain (e.g., pancreatitis, kidney stones), surgical operations, and non-healing lesions. For these applications, the diagnostic methods of the invention are typically used at a frequency that is effective to monitor the early development of sepsis, inSIRS or post-surgical inflammation to thereby enable early therapeutic intervention and treatment of those conditions. In illustrative examples, the diagnostic methods are used at least at 1, 2, 3, 4, 5, 6, 7, 8, 9, 10, 11, 12, 13, 14, 15, 16, 17, 18, 19, 20, 21, 22, 23 or 24 hour intervals or at least 1, 2, 3, 4, 5 or 6 day intervals, or at least weekly, fortnightly or monthly.

[0041] Thus, in a related aspect, the present invention provides methods for treating, preventing or inhibiting the development of at least one condition selected from sepsis, inSIRS or post-surgical inflammation in a subject. These methods generally comprise:
[0042] comparing the level of at least one IRC expression product of a multi-transcript-producing gene in the subject to the level of a corresponding IRC marker expression product in at least one control subject selected from: a post-surgical inflammation-positive subject, an inSIRS positive subject, and a sepsis-positive subject, wherein a difference between the level of the at least one IRC marker expression product and the level of the corresponding IRC marker expression product indicates whether the subject has, or is at risk of developing, one of the conditions, wherein the at least one IRC marker expression product is predetermined as being differentially expressed between at least two of the conditions and wherein at least one other expression product from the multi-transcript producing gene is predetermined as being not so differentially expressed; and
[0043] administering to the subject, on the basis that the subject tests positive for sepsis, an effective amount of an agent that treats or ameliorates the symptoms or reverses or inhibits the development of sepsis, or
[0044] administering to the subject, on the basis that the subject tests positive for inSIRS, an effective amount of an agent that treats or ameliorates the symptoms or reverses or inhibits the development of inSIRS; or
[0045] administering to the subject, on the basis that the subject tests positive for post-surgical inflammation, an effective amount of an agent that treats or ameliorates the symptoms or reverses or inhibits the development of post-surgical inflammation.

[0046] Representative examples of sepsis treatments or agents include but are not limited to, antibiotics, intravenous fluids, vasoactives, palliative support for damaged or distressed organs (e.g. oxygen for respiratory distress, fluids for hypovolemia) and close monitoring of vital organs.

[0047] Non-limiting examples of such inSIRS treatments or agents include but are not limited to, antibiotics, steroids, intravenous fluids, glucocorticoids, vasoactives, palliative support for damaged or distressed organs (e.g. oxygen for respiratory distress, fluids for hypovolemia) and close monitoring of vital organs.

[0048] Illustrative examples of such post-surgical inflammation treatments or agents include but are not limited to, antibiotics, intravenous fluids, anti-inflammatory agents and immunomodulatory agents.

[0049] Still another aspect of the present invention provides the use of at least one IRC marker polynucleotide as broadly described above, or at least one IRC marker polypeptide as broadly described above, or at least one probe comprising or consisting essentially of a nucleic acid sequence which corresponds or is complementary to at least a portion of a nucleotide sequence encoding a IRC marker polypeptide as broadly described above, or the use of at least one antigen-binding molecule that is immuno-interactive with a IRC marker polypeptide as broadly described above, in the manufacture of a kit for assessing or diagnosing the presence or risk of development of, or distinguishing between, sepsis, inSIRS and post-surgical inflammation.

### DETAILED DESCRIPTION OF THE INVENTION

### 1. Definitions

[0050] Unless defined otherwise, all technical and scientific terms used herein have the same meaning as commonly understood by those of ordinary skill in the art to which the invention belongs. Although any methods and materials similar or equivalent to those described herein can be used in the practice or testing of the present invention, preferred methods and materials are described. For the purposes of the present invention, the following terms are defined below.

[0051] The articles “a” and “an” are used herein to refer to one or to more than one (i.e., to at least one) of the grammatical object of the article. By way of example, “an element” means one element or more than one element.

[0052] The term “differential expression,” as used herein to describe the expression of an IRC expression product of a multi-transcript-producing gene, refers to the overexpression (up-regulation) or underexpression (down-regulation) of the IRC marker expression product (e.g., transcript or polypeptide) relative to the level of expression of a corresponding IRC marker expression product in a control subject as defined herein, and encompasses a higher or lower level of a IRC marker expression product (e.g., transcript or polypeptide) in a tissue sample or body fluid relative to a reference sample. In certain embodiments, an IRC marker expression product is differentially expressed if the level of the IRC marker expression product in a biological sample obtained from a test subject is at least 110%, 120%, 130%, 140%, 150%, 160%, 170%, 180%, 190%, 200%, 300%, 400%, 500%, 600%, 700%, 800%, 900% or 1000%, or no more than about 95%, 90%, 80%, 70%, 60%, 50%, 40%, 30%, 20%, 10%, 5%, 4%, 3%, 2%, 1%, 0.5%, 0.1%, 0.01%, 0.001% or 0.0001% of the level of expression of a corresponding IRC marker gene expression product in a reference sample obtained from a control subject as defined herein.

[0053] By “about” is meant a measurement, quantity, level, value, number, frequency, percentage, dimension, size, amount, weight or length that varies by as much as 10, 9, 8, 7, 6, 5, 4, 3, 2 or 1% to a reference measurement, quantity, level, value, number, frequency, percentage, dimension, size, amount, weight or length.

[0054] The term “amplicon” refers to a target sequence for amplification, and/or the amplification products of a target sequence for amplification. In certain other embodiments an “amplicon” may include the sequence of probes or primers used in amplification.

[0055] By “antigen-binding molecule” is meant a molecule that has binding affinity for a target antigen. It will be understood that this term extends to immunoglobulins, immunoglobulin fragments and non-immunoglobulin derived protein frameworks that exhibit antigen-binding activity.

[0056] As used herein, the term “binds specifically,” “specifically immuno-interactive” and the like when referring to an antigen-binding molecule refers to a binding reaction which is determinative of the presence of an antigen in the presence of a heterogeneous population of proteins and other biologics. Thus, under designated immunoassay conditions, the specified antigen-binding molecules bind to a particular antigen and do not bind in a significant amount to other proteins or antigens present in the sample. Specific binding to an antigen under such conditions may require an antigen-binding molecule that is selected for its specificity for a particular antigen. For example, antigen-binding molecules can be raised to a selected protein antigen, which bind to that antigen but not to other proteins present in a sample. A variety of immunoassay formats may be used to select antigen-binding molecules specifically immuno-interactive with a particular protein. For example, solid-phase ELISA immunoassays are routinely used to select monoclonal antibodies specifically immuno-interactive with a protein. See Harlow and Lane (1988) Antibodies, A Laboratory Manual, Cold Spring Harbor Publications, New York, for a description of immunoassay formats and conditions that can be used to determine specific immunoreactivity.

[0057] The term “biological sample” as used herein refers to a sample that may be extracted, untreated, treated, diluted or concentrated from an animal. The biological sample may include a biological fluid such as whole blood, serum, plasma, saliva, urine, sweat, ascitic fluid, peritoneal fluid, synovial fluid, amniotic fluid, cerebrospinal fluid, tissue biopsy, and the like. In certain embodiments, the biological sample is blood, especially peripheral blood.

[0058] Throughout this specification, unless the context requires otherwise, the words “comprise,” “comprises” and “comprising” will be understood to imply the inclusion of a stated step or element or group of steps or elements but not the exclusion of any other step or element or group of steps or elements:

[0059] By “corresponds to” or “corresponding to” is meant a polynucleotide (a) having a nucleotide sequence that is substantially identical or complementary to all or a portion of a reference polynucleotide sequence or (b) encoding an amino acid sequence identical to an amino acid sequence in a peptide or protein. This phrase also includes within its scope a peptide or polypeptide having an amino acid sequence that is substantially identical to a sequence of amino acids in a reference peptide or protein.

[0060] By “effective amount”, in the context of treating or preventing a condition is meant the administration of that amount of active to an individual in need of such treatment or prophylaxis, either in a single dose or as part of a series, that is effective for the prevention of incurring a symptom, holding in check such symptoms, and/or treating existing symptoms, of that condition. The effective amount will vary depending upon the health and physical condition of the individual to be treated, the taxonomic group of individual to be treated, the formulation of the composition, the assessment of the medical situation, and other relevant factors. It is expected that the amount will fall in a relatively broad range that can be determined through routine trials.

[0061] The terms “expression” or “gene expression” refer to production of RNA message or translation of RNA message into proteins or polypeptides, or both. Detection of either types of gene expression in use of any of the methods described herein is encompassed by the present invention.

[0062] By “expression vector” is meant any autonomous genetic element capable of directing the transcription of a polynucleotide contained within the vector and suitably the synthesis of a peptide or polypeptide encoded by the polynucleotide. Such expression vectors are known to practitioners in the art.

[0063] As used herein, the term “functional activity” generally refers to the ability of a molecule (e.g., a transcript or polypeptide) to perform its designated function including a biological, enzymatic, or therapeutic function. In certain embodiments, the functional activity of a molecule corresponds to its specific activity as determined by any suitable assay known in the art.

[0064] The term “gene” as used herein refers to any and all discrete coding regions of the cell's genome, as well as associated non-coding and regulatory regions. The gene is also intended to mean the open reading frame encoding specific polypeptides, introns, and adjacent 5′ and 3′ non-coding nucleotide sequences involved in the regulation of expression. In this regard, the gene may further comprise control signals such as promoters, enhancers, termination and/or polyadenylation signals that are naturally associated with a given gene, or heterologous control signals. The DNA sequences may be cDNA or genomic DNA or a fragment thereof. The gene may be introduced into an appropriate vector for extrachromosomal maintenance or for integration into the host.

[0065] By “high density polynucleotide arrays” and the like is meant those arrays that contain at least 400 different features per cm².

[0066] The phrase “high discrimination hybridization conditions” refers to hybridization conditions in which single base mismatch may be determined.

[0067] By “housekeeping gene” is meant a gene that is expressed in virtually all cells since it is fundamental to the any cell's functions (e.g., essential proteins and RNA molecules).

[0068] “Hybridization” is used herein to denote the pairing of complementary nucleotide sequences to produce a DNA-DNA hybrid or a DNA-RNA hybrid. Complementary base sequences are those sequences that are related by the base-pairing rules. In DNA, A pairs with T and C pairs with G. In RNA, U pairs with A and C pairs with G. In this regard, the terms “match” and “mismatch” as used herein refer to the hybridization potential of paired nucleotides in complementary nucleic acid strands. Matched nucleotides hybridize efficiently, such as the classical A-T and G-C base pair mentioned above. Mismatches are other combinations of nucleotides that do not hybridize efficiently.

[0069] The phrase “hybridizing specifically to” and the like refer to the binding, duplexing, or hybridizing of a molecule only to a particular nucleotide sequence under stringent conditions when that sequence is present in a complex mixture (e.g., total cellular) DNA or RNA.

[0070] Reference herein to “immuno-interactive” includes reference to any interaction, reaction, or other form of association between molecules and in particular where one of the molecules is, or mimics, a component of the immune system.

[0071] By “isolated” is meant material that is substantially or essentially free from components that normally accompany it in its native state. For example, an “isolated polynucleotide,” as used herein, refers to a polynucleotide, which has been purified from the sequences which flank it in a naturally-occurring state, e.g., a DNA fragment which has been removed from the sequences that are normally adjacent to the fragment. Alternatively, an “isolated peptide” or an “isolated polypeptide” and the like, as used herein, refer to in vitro isolation and/or purification of a peptide or polypeptide molecule from its natural cellular environment, and from association with other components of the cell, i.e., it is not associated with in vivo substances.

[0072] As used herein, a “naturally-occurring” nucleic acid molecule refers to a RNA or DNA molecule having a nucleotide sequence that occurs in nature. For example a naturally-occurring nucleic acid molecule can encode a protein that occurs in nature.

[0073] By “obtained” is meant to come into possession. Biological or reference samples so obtained include, for example, nucleic acid extracts or polypeptide extracts isolated or derived from a particular source. For instance, the extract may be isolated directly from a biological fluid or tissue of a subject.

[0074] The term “oligonucleotide” as used herein refers to a polymer composed of a multiplicity of nucleotide residues (deoxyribonucleotides or ribonucleotides, or related structural variants or synthetic analogues thereof, including nucleotides with modified or substituted sugar groups and the like) linked via phosphodiester bonds (or related structural variants or synthetic analogues thereof). Thus, while the term “oligonucleotide” typically refers to a nucleotide polymer in which the nucleotide residues and linkages between them are naturally-occurring, it will be understood that the term also includes within its scope various analogues including, but not restricted to, peptide nucleic acids (PNAs), phosphorothioate, phosphorodithioate, phosphoroselenoate, phosphorodiselenoate, phosphoroanilothioate, phosphoraniladate, phosphoroamidate, methyl phosphonates, 2-O-methyl ribonucleic acids, and the like. The exact size of the molecule can vary depending on the particular application. Oligonucleotides are a polynucleotide subset with 200 bases or fewer in length. Preferably, oligonucleotides are 10 to 60 bases in length and most preferably 12, 13, 14, 15, 16, 17, 18, 19, or 20 to 40 bases in length. Oligonucleotides are usually single stranded, e.g., for probes; although oligonucleotides may be double stranded, e.g., for use in the construction of a variant nucleic acid sequence. Oligonucleotides of the invention can be either sense or antisense oligonucleotides.

[0075] The term “oligonucleotide array” refers to a substrate having oligonucleotide probes with different known sequences deposited at discrete known locations associated with its surface. For example, the substrate can be in the form of a two dimensional substrate as described in U.S. Pat. No. 5,424,186. Such substrate may be used to synthesize two-dimensional spatially addressed oligonucleotide (matrix) arrays. Alternatively, the substrate may be characterized in that it forms a tubular array in which a two dimensional planar sheet is rolled into a three-dimensional tubular configuration. The substrate may also be in the form of a microsphere or bead connected to the surface of an optic fiber as, for example, disclosed by Chee et al. in WO 00/39587. Oligonucleotide arrays have at least two different features and a density of at least 400 features per cm². In certain embodiments, the arrays can have a density of about 500, at least one thousand, at least 10 thousand, at least 100 thousand, at least one million or at least 10 million features per cm². For example, the substrate may be silicon or glass and can have the thickness of a glass microscope slide or a glass cover slip, or may be composed of other synthetic polymers. Substrates that are transparent to light are useful when the method of performing an assay on the substrate involves optical detection. The term also refers to a probe array and the substrate to which it is attached that form part of a wafer.

[0076] The term “operably connected” or “operably linked” as used herein means placing a structural gene under the regulatory control of a promoter, which then controls the transcription and optionally translation of the gene. In the construction of heterologous promoter/structural gene combinations, it is generally preferred to position the genetic sequence or promoter at a distance from the gene transcription start site that is approximately the same as the distance between that genetic sequence or promoter and the gene it controls in its natural setting; i.e. the gene from which the genetic sequence or promoter is derived. As is known in the art, some variation in this distance can be accommodated without loss of function. Similarly, the preferred positioning of a regulatory sequence element with respect to a heterologous gene to be placed under its control is defined by the positioning of the element in its natural setting; i.e., the genes from which it is derived.

[0077] The term “pathogen” is used herein in its broadest sense to refer to an organism or an infectious agent whose infection of cells of viable animal tissue elicits a disease response.

[0078] The term “polynucleotide” or “nucleic acid” as used herein designates mRNA, RNA, cRNA, cDNA or DNA. The term typically refers to a polymeric form of nucleotides of at least 10 bases in length, either ribonucleotides or deoxynucleotides or a modified form of either type of nucleotide. The term includes single and double stranded forms of DNA.

[0079] The terms “polynucleotide variant” and “variant” refer to polynucleotides displaying substantial sequence identity with a reference polynucleotide sequence or polynucleotides that hybridize with a reference sequence under stringent conditions that are defined hereinafter. These terms also encompass polynucleotides in which one or more nucleotides have been added or deleted, or replaced with different nucleotides. In this regard, it is well understood in the art that certain alterations inclusive of mutations, additions, deletions and substitutions can be made to a reference polynucleotide whereby the altered polynucleotide retains a biological function or activity of the reference polynucleotide. The terms “polynucleotide variant” and “variant” also include naturally-occurring allelic variants.

[0080] “Polypeptide”, “peptide” and “protein” are used interchangeably herein to refer to a polymer of amino acid residues and to variants and synthetic analogues of the same. Thus, these terms apply to amino acid polymers in which one or more amino acid residues is a synthetic non-naturally-occurring amino acid, such as a chemical analogue of a corresponding naturally-occurring amino acid, as well as to naturally-occurring amino acid polymers.

[0081] The term “polypeptide variant” refers to polypeptides which are distinguished from a reference polypeptide by the addition, deletion or substitution of at least one amino acid residue. In certain embodiments, one or more amino acid residues of a reference polypeptide are replaced by different amino acids. It is well understood in the art that some amino acids may be changed to others with broadly similar properties without changing the nature of the activity of the polypeptide (conservative substitutions) as described hereinafter.

[0082] As used herein, “post-surgical inflammation” refers to a condition arising due to an immune response to a stimulus relating to a surgical insult. Post-surgical inflammation can be local or systemic and is often characterized by swelling, fever, pain and/or redness. Inflammation involves the movement of fluid and cells (e.g., white blood cells or leukocytes, neutrophils, monocytes and T- and B-cells) into the affected area, site or tissue. Excessive, misdirected and/or inappropriate immune inflammatory responses resulting from surgery can lead to SIRS and to damage of normal, healthy body tissues.

[0083] By “primer” is meant an oligonucleotide which, when paired with a strand of DNA, is capable of initiating the synthesis of a primer extension product in the presence of a suitable polymerizing agent. The primer is preferably single-stranded for maximum efficiency in amplification but can alternatively be double-stranded. A primer must be sufficiently long to prime the synthesis of extension products in the presence of the polymerization agent. The length of the primer depends on many factors, including application, temperature to be employed, template reaction conditions, other reagents, and source of primers. For example, depending on the complexity of the target sequence, the primer may be at least about 5, 6, 7, 8, 9, 10, 11, 12, 13, 14, 15, 16, 17, 18, 19, 20, 21, 22, 23, 24, 25, 26, 27, 28, 29, 30, 35, 40, 50, 75, 100, 150, 200, 300, 400, 500, to one base shorter in length than the template sequence at the 3′ end of the primer to allow extension of a nucleic acid chain, though the 5′ end of the primer may extend in length beyond the 3′ end of the template sequence. In certain embodiments, primers can be large polynucleotides, such as from about 35 nucleotides to several kilobases or more. Primers can be selected to be “substantially complementary” to the sequence on the template to which it is designed to hybridize and serve as a site for the initiation of synthesis. By “substantially complementary”, it is meant that the primer is sufficiently complementary to hybridize with a target polynucleotide. Desirably, the primer contains no mismatches with the template to which it is designed to hybridize but this is not essential. For example, non-complementary nucleotide residues can be attached to the 5′ end of the primer, with the remainder of the primer sequence being complementary to the template. Alternatively, non-complementary nucleotide residues or a stretch of non-complementary nucleotide residues can be interspersed into a primer, provided that the primer sequence has sufficient complementarity with the sequence of the template to hybridize therewith and thereby form a template for synthesis of the extension product of the primer.

[0084] “Probe” refers to a molecule that binds to a specific sequence or sub-sequence or other moiety of another molecule. Unless otherwise indicated, the term “probe” typically refers to a polynucleotide probe that binds to another polynucleotide, often called the “target polynucleotide”, through complementary base pairing. Probes can bind target polynucleotides lacking complete sequence complementarity with the probe, depending on the stringency of the hybridization conditions. Probes can be labeled directly or indirectly and include primers within their scope.

[0085] The term “recombinant polynucleotide” as used herein refers to a polynucleotide formed in vitro by the manipulation of nucleic acid into a form not normally found in nature. For example, the recombinant polynucleotide may be in the form of an expression vector. Generally, such expression vectors include transcriptional and translational regulatory nucleic acid operably linked to the nucleotide sequence.

[0086] By “recombinant polypeptide” is meant a polypeptide made using recombinant techniques, i.e., through the expression of a recombinant or synthetic polynucleotide.

[0087] By “regulatory element” or “regulatory sequence” is meant nucleic acid sequences (e.g., DNA) necessary for expression of an operably linked coding sequence in a particular host cell. The regulatory sequences that are suitable for prokaryotic cells for example, include a promoter, and optionally a cis-acting sequence such as an operator sequence and a ribosome binding site. Control sequences that are suitable for eukaryotic cells include promoters, polyadenylation signals, transcriptional enhancers, translational enhancers, leader or trailing sequences that modulate mRNA stability, as well as targeting sequences that target a product encoded by a transcribed polynucleotide to an intracellular compartment within a cell or to the extracellular environment.

[0088] As used herein, “sepsis” is defined as SIRS with a presumed or confirmed systemic infectious process. Confirmation of infectious process can be determined using microbiological culture or isolation of the infectious agent. From an immunological perspective, sepsis may be seen as a systemic response to systemic live microorganisms or systemic infection.

[0089] The term “sequence identity” as used herein refers to the extent that sequences are identical on a nucleotide-by-nucleotide basis or an amino acid-by-amino acid basis over a window of comparison. Thus, a “percentage of sequence identity” is calculated by comparing two optimally aligned sequences over the window of comparison, determining the number of positions at which the identical nucleic acid base (e.g., A, T, C, G, I) or the identical amino acid residue (e.g., Ala, Pro, Ser, Thr, Gly, Val, Leu, Ile, Phe, Tyr, Trp, Lys, Arg, H is, Asp, Glu, Asn, Gln, Cys and Met) occurs in both sequences to yield the number of matched positions, dividing the number of matched positions by the total number of positions in the window of comparison (i.e., the window size), and multiplying the result by 100 to yield the percentage of sequence identity. For the purposes of the present invention, “sequence identity” will be understood to mean the “match percentage” calculated by the DNASIS computer program (Version 2.5 for windows; available from Hitachi Software engineering Co., Ltd., South San Francisco, Calif., USA) using standard defaults as used in the reference manual accompanying the software.

[0090] “Similarity” refers to the percentage number of amino acids that are identical or constitute conservative substitutions as defined in Table A infra. Similarity may be determined using sequence comparison programs such as GAP (Deveraux et al. 1984, Nucleic Acids Research 12, 387-395). In this way, sequences of a similar or substantially different length to those cited herein might be compared by insertion of gaps into the alignment, such gaps being determined, for example, by the comparison algorithm used by GAP.

[0091] Terms used to describe sequence relationships between two or more polynucleotides or polypeptides include “reference sequence,” “comparison window,” “sequence identity,” “percentage of sequence identity” and “substantial identity”. A “reference sequence” is at least 12 but frequently 15 to 18 and often at least 25 monomer units, inclusive of nucleotides and amino acid residues, in length. Because two polynucleotides may each comprise (1) a sequence (i.e., only a portion of the complete polynucleotide sequence) that is similar between the two polynucleotides, and (2) a sequence that is divergent between the two polynucleotides, sequence comparisons between two (or more) polynucleotides are typically performed by comparing sequences of the two polynucleotides over a “comparison window” to identify and compare local regions of sequence similarity. A “comparison window” refers to a conceptual segment of at least 6 contiguous positions, usually about 50 to about 100, more usually about 100 to about 150 in which a sequence is compared to a reference sequence of the same number of contiguous positions after the two sequences are optimally aligned. The comparison window may comprise additions or deletions (i.e., gaps) of about 20% or less as compared to the reference sequence (which does not comprise additions or deletions) for optimal alignment of the two sequences. Optimal alignment of sequences for aligning a comparison window may be conducted by computerized implementations of algorithms (GAP, BESTFIT, FASTA, and TFASTA in the Wisconsin Genetics Software Package Release 7.0, Genetics Computer Group, 575 Science Drive Madison, Wis., USA) or by inspection and the best alignment (i.e., resulting in the highest percentage homology over the comparison window) generated by any of the various methods selected. Reference also may be made to the BLAST family of programs as for example disclosed by Altschul et al., 1997, Nucl. Acids Res. 25:3389. A detailed discussion of sequence analysis can be found in Unit 19.3 of Ausubel et al., “Current Protocols in Molecular Biology”, John Wiley & Sons Inc, 1994-1998, Chapter 15.

[0092] The terms “subject” or “individual” or “patient”, used interchangeably herein, refer to any subject, particularly a vertebrate subject, and even more particularly a mammalian subject, for whom therapy or prophylaxis is desired. Suitable vertebrate animals that fall within the scope of the invention include, but are not restricted to, primates, avians, livestock animals (e.g., sheep, cows, horses, donkeys, pigs), laboratory test animals (e.g., rabbits, mice, rats, guinea pigs, hamsters), companion animals (e.g., cats, dogs) and captive wild animals (e.g., foxes, deer, dingoes). A preferred subject is an equine animal in need of treatment or prophylaxis of sepsis. However, it will be understood that the aforementioned terms do not imply that symptoms are present.

[0093] The phrase “substantially similar affinities” refers herein to target sequences having similar strengths of detectable hybridization to their complementary or substantially complementary oligonucleotide probes under a chosen set of stringent conditions.

[0094] “Systemic Inflammatory Response Syndrome (SIRS),” as used herein, refers to a clinical response arising from a non-specific insult with two or more of the following measurable clinical characteristics; a body temperature greater than 38° C. or less than 36° C., a heart rate greater than 90 beats per minute, a respiratory rate greater than 20 per minute, a white blood cell count (total leukocytes) greater than 12,000 per mm³ or less than 4,000 per mm³, or a band neutrophil percentage greater than 10%. From an immunological perspective, it may be seen as representing a systemic response to insult (e.g., major surgery) or systemic inflammation. As used herein, therefore, “infection-negative SIRS (inSIRS)” includes the clinical response noted above but in the absence of a systemic infectious process.

[0095] The term “template” as used herein refers to a nucleic acid that is used in the creation of a complementary nucleic acid strand to the “template” strand. The template may be either RNA and/or DNA, and the complementary strand may also be RNA and/or DNA. In certain embodiments, the complementary strand may comprise all or part of the complementary sequence to the “template,” and/or may include mutations so that it is not an exact, complementary strand to the “template”. Strands that are not exactly complementary to the template strand may hybridize specifically to the template strand in detection assays described here, as well as other assays known in the art, and such complementary strands that can be used in detection assays are part of the invention.

[0096] The term “transformation” means alteration of the genotype of an organism, for example a bacterium, yeast, mammal, avian, reptile, fish or plant, by the introduction of a foreign or endogenous nucleic acid.

[0097] The term “treat” is meant to include both therapeutic and prophylactic treatment.

[0098] By “vector” is meant a polynucleotide molecule, suitably a DNA molecule derived, for example, from a plasmid, bacteriophage, yeast, virus, mammal, avian, reptile or fish into which a polynucleotide can be inserted or cloned. A vector preferably contains one or more unique restriction sites and can be capable of autonomous replication in a defined host cell including a target cell or tissue or a progenitor cell or tissue thereof, or be integrable with the genome of the defined host such that the cloned sequence is reproducible. Accordingly, the vector can be an autonomously replicating vector, i.e., a vector that exists as an extrachromosomal entity, the replication of which is independent of chromosomal replication, e.g., a linear or closed circular plasmid, an extrachromosomal element, a minichromosome, or an artificial chromosome. The vector can contain any means for assuring self-replication. Alternatively, the vector can be one which, when introduced into the host cell, is integrated into the genome and replicated together with the chromosome(s) into which it has been integrated. A vector system can comprise a single vector or plasmid, two or more vectors or plasmids, which together contain the total DNA to be introduced into the genome of the host cell, or a transposon. The choice of the vector will typically depend on the compatibility of the vector with the host cell into which the vector is to be introduced. The vector can also include a selection marker such as an antibiotic resistance gene that can be used for selection of suitable transformants. Examples of such resistance genes are known to those of skill in the art.

[0099] The terms “wild-type” and “normal” are used interchangeably to refer to the phenotype that is characteristic of most of the members of the species occurring naturally and contrast for example with the phenotype of a mutant.

### 2. Abbreviations

[0100] The following abbreviations are used throughout the application:

[0101] nt=nucleotide

[0102] nts=nucleotides

[0103] aa=amino acid(s)

[0104] kb=kilobase(s) or kilobase pair(s)

[0105] kDa=kilodalton(s)

[0106] d=day

[0107] h=hour

[0108] s=seconds

### 3. Markers of Sepsis, inSIRS and Post-Surgical Inflammation and Uses Therefor

[0109] The present invention is predicated in part on the identification of 235 genes that show evidence of splice variation in which only particular splice variants of individual genes differ in expression between sepsis-positive patients, inSIRS-positive patients and post-surgical patients. Of these 235 multi-transcript-producing genes, only a limited number (57) were found to express specific splice variants, which comprise “condition-separating exons” and which are useful as classifiers to distinguish between these patient groups. These multi-transcript-producing genes are listed in Table 1.

[0110] Thus, in accordance with the present invention, specific splice variants of the above multi-transcript-producing genes and their polypeptide products provide a means for separating sepsis, inSIRS and post-surgical inflammation, allowing for qualitative or quantitative grading of inflammatory response as if there were a “continuum” of severity of inflammatory response from post-surgical inflammation through to sepsis. These markers are thus designated herein “inflammatory response continuum” or “IRC” marker expression products, which are listed in Table 2, 3 and 4.

[0111] Accordingly, the IRC marker expression products of the present invention are useful in methods for diagnosis, detection of host response, determining degree of host response, monitoring, treatment or management of, or distinguishing between, infection-negative systemic inflammatory response syndrome (inSIRS) and sepsis as well as post-surgical inflammation in mammals. More particularly, the present invention relates to the use of specific expression products from a multi-transcript-producing gene for distinguishing between inSIRS and sepsis and post-surgical inflammation.

[0112] In specific embodiments, the IRC markers are in the form of RNA molecules of specified sequences, or polypeptides transcribed from these RNA molecules in cells, especially in blood cells, and more especially in peripheral blood cells, of subjects with or susceptible to sepsis/inSIRS/post-surgical inflammation, are disclosed. These markers are indicators of sepsis/inSIRS/post-surgical inflammation and, when differentially expressed as compared to their expression in control subjects selected from sepsis-positive subjects, inSIRS-positive subjects, post-surgical inflammation positive subjects and normal subjects or subjects that do not have any of these conditions, they distinguish between, and are diagnostic for the presence or absence of, those conditions in tested subjects. Such markers provide considerable advantages over the prior art in this field. In certain advantageous embodiments where leukocytes (e.g., peripheral blood cells) are used for the analysis, it is possible to diagnose sepsis before serum antibodies to endotoxin, or endotoxemia-causing agents are detected.

[0113] It will be apparent that the nucleic acid sequences disclosed herein (also referred to herein as “IRC marker polynucleotides”) will find utility in a variety of applications in detection, diagnosis, prognosis and treatment of sepsis, inSIRS and post-surgical inflammation. Examples of such applications within the scope of the present disclosure include amplification of IRC marker polynucleotides using specific primers, detection of IRC marker polynucleotides by hybridization with oligonucleotide probes, incorporation of isolated nucleic acids into vectors, expression of vector-incorporated nucleic acids as RNA and protein, and development of immunological/detection/diagnostic/prognostic reagents corresponding to marker encoded products.

[0114] The identified IRC marker polynucleotides may in turn be used to design specific oligonucleotide probes and primers. Such probes and primers may be of any length that would specifically hybridize to the identified IRC marker polynucleotides and may be at least about 10, 11, 12, 13, 14, 15, 16, 17, 18, 19, 20, 21, 22, 23, 24, 25, 26, 27, 28, 29, 30, 35, 40, 50, 75, 100, 150, 200, 300, 400, 500 nucleotides in length and in the case of probes, up to the full-length of the sequences of one or more of condition-separating exons contained in a IRC marker polynucleotide or up to the full-length of an IRC marker polynucleotide as identified herein. Probes may, also include additional sequence at their 5′ and/or 3′ ends so that they extent beyond the target sequence with which they hybridize.

[0115] When used in combination with nucleic acid amplification procedures, these probes and primers enable the rapid analysis of biological samples (e.g., peripheral blood samples) for detecting or quantifying IRC marker polynucleotides (e.g., transcripts). Such procedures include any method or technique known in the art or described herein for duplicating or increasing the number of copies or amount of a target nucleic acid or its complement.

[0116] One of ordinary skill in the art could select segments from the identified IRC marker polynucleotides and their encoded polypeptide products (also referred to herein as “IRC marker polypeptides”) for use in the different detection, diagnostic, or prognostic methods, vector constructs, antigen-binding molecule production, kit, and/or any of the embodiments described herein as part of the present invention. Representative sequences that are desirable for use in the invention are those set forth in SEQ ID NO: 1-88 (see Tables 2, 3 and 4).

### 4. Nucleic Acid Molecules of the Invention

[0117] As described in the Examples and in Tables 1-4, the present disclosure provides IRC marker polynucleotides comprising condition-separating exons from 57 multi-transcript-producing genes selected from ANKDD1A, GABRR2, OTX1, PANX2, RHBDF2, SLAMF7, AMBRA1, CES2, CLPB, HIPK2, C1ORF91, NDST1, SLC36A1, ADAM19, CUL7, TG, PDCD1LG2, GRINL1A, MGRN1, SNTB2, CDK5R1, GAA, KATNAL2, CEACAM4, ZNF335, ASPHD2, ACRC, BTNL8, MOV10, MED12L, KLHL6, PDLIM5, GALNT10, SCRN1, VOPP1, FKBP9, KIF27, PIWIL4, TEP1, GCH1, PRR11, CDH2, PPM1N, RRAS, DDOST, APH1A, TTL, TEX261, COQ2, FCHSD1, BAK1, SLC25A25, RELT, ACP2, TBC1D2B, FANCA or SLC39A11. Representative IRC marker polynucleotides have been identified by exon array analysis of blood obtained from patients with clinical evidence of sepsis or inSIRS or post-surgical inflammation and these are set forth in SEQ ID NO:1, 3, 5, 7, 9, 11, 13, 15, 17, 19, 21, 23, 25, 27, 29, 31, 33, 35, 37, 39, 41, 43, 45, 47, 49, 51, 53, 55, 57, 59, 61, 63, 65, 67, 69, 71, 73, 75, 77, 79, 81, 83, 85, 87, 89, 91, 93, 95, 97, 99, 101, 103, 105, 107, 109, 111, 113, 115, 117, 119, 121, 123, 125, 127, 129, 131, 133, 135, 137, 139, 141, 143, 145, 147, 149, 151, 153, 155, 157, 159, 161, 163, 165, 167, 169, 171, 173, 175, 177, 179, 181, 183, 185, 187, 189, 191, 193, 195, 197, 199, 201, 203, 205, 207, 209, 211, 213, 215, 217, 219, 221, 223, 225, 227, 229, 231, 233, 235, 237, 239, 241, 243, 245, 247, 249, 251, 253, 255, 257, 259, 261, 263, 265, 267, 269, 271, 273, 275, 277, 279, 281, 283, 285, 287, 289, 291, 293, 295, 297, 299, 301, 303, 305, 307, 309, 311, 313, 315, 317, 319, 321, 323, 325, 327, 329, 331, 333, 335, 337, 339, 341, 343, 345, 347, 349, 351, 353, 355, 357, 359, 361, 363, 365, 367, 369, 371, 373, 375, 377, 379, 381, 383, 385, 387, 389, 391, 393, 395, 397, 399, 401, 403, 405, 407, 409, 411, 413, 415, 417, 419, 421, 423, 425, 427, 429, 431, 433, 435, 437, 439, 441, 443, 445, 447, 449, 451, 453, 455, 457, 459, 461, 463, 465, 467, 469, 471, 473, 475, 477, 479, 481, 483, 485, 487, 489, 491, 493, 495, 497, 499, 501, 503, 505, 507, 509, 511, 513 or 515. These sequences, which are presented in Tables 2-4, are diagnostic for the presence or absence of sepsis or inSIRS or post-surgical inflammation.

[0118] In accordance with the present invention, the sequences of isolated nucleic acids disclosed herein find utility inter alia as hybridization probes or amplification primers. In certain embodiments, these probes and primers represent oligonucleotides, which are of sufficient length to provide specific hybridization to a RNA or DNA sample extracted from the biological sample. The sequences typically will be about 10-20 nucleotides, but may be longer. Longer sequences, e.g., of about 30, 40, 50, 100, 500 and even up to the full-length of condition-separating exons or of the IRC marker polynucleotides, are desirable for certain embodiments.

[0119] Nucleic acid molecules having contiguous stretches of about 10, 15, 17, 20, 30, 40, 50, 60, 75 or 100 or 500 nucleotides of a sequence set forth in any one of SEQ ID NO: 1, 3, 5, 7, 9, 11, 13, 15, 17, 19, 21, 23, 25, 27, 29, 31, 33, 35, 37, 39, 41, 43, 45, 47, 49, 51, 53, 55, 57, 59, 61, 63, 65, 67, 69, 71, 73, 75, 77, 79, 81, 83, 85, 87, 89, 91, 93, 95, 97, 99, 101, 103, 105, 107, 109, 111, 113, 115, 117, 119, 121, 123, 125, 127, 129, 131, 133, 135, 137, 139, 141, 143, 145, 147, 149, 151, 153, 155, 157, 159, 161, 163, 165, 167, 169, 171, 173, 175, 177, 179, 181, 183, 185, 187, 189, 191, 193, 195, 197, 199, 201, 203, 205, 207, 209, 211, 213, 215, 217, 219, 221, 223, 225, 227, 229, 231, 233, 235, 237, 239, 241, 243, 245, 247, 249, 251, 253, 255, 257, 259, 261, 263, 265, 267, 269, 271, 273, 275, 277, 279, 281, 283, 285, 287, 289, 291, 293, 295, 297, 299, 301, 303, 305, 307, 309, 311, 313, 315, 317, 319, 321, 323, 325, 327, 329, 331, 333, 335, 337, 339, 341, 343, 345, 347, 349, 351, 353, 355, 357, 359, 361, 363, 365, 367, 369, 371, 373, 375, 377, 379, 381, 383, 385, 387, 389, 391, 393, 395, 397, 399, 401, 403, 405, 407, 409, 411, 413, 415, 417, 419, 421, 423, 425, 427, 429, 431, 433, 435, 437, 439, 441, 443, 445, 447, 449, 451, 453, 455, 457, 459, 461, 463, 465, 467, 469, 471, 473, 475, 477, 479, 481, 483, 485, 487, 489, 491, 493, 495, 497, 499, 501, 503, 505, 507, 509, 511, 513 or 515 are contemplated. Molecules that are complementary to the above mentioned sequences and that bind to these sequences under high stringency conditions are also contemplated. These probes are useful in a variety of hybridization embodiments, such as Southern and northern blotting. In some cases, it is contemplated that probes may be used that hybridize to multiple target sequences without compromising their ability to effectively diagnose the presence or absence or distinguish between sepsis, inSIRS and post-surgical inflammation. In general, it is contemplated that the hybridization probes described herein are useful both as reagents in solution hybridization, as in PCR, for detection of expression of corresponding genes, as well as in embodiments employing a solid phase.

[0120] Various probes and primers may be designed around the disclosed nucleotide sequences. For example, in certain embodiments, the sequences used to design probes and primers may include repetitive stretches of adenine nucleotides (poly-A tails) normally attached at the ends of the RNA for the identified marker genes. In other embodiments, probes and primers may be specifically designed to not include these or other segments from the identified marker genes, as one of ordinary skilled in the art may deem certain segments more suitable for use in the detection methods disclosed. In any event, the choice of primer or probe sequences for a selected application is within the realm of the ordinary skilled practitioner. Illustrative primer/probe sequences for detection of IRC marker polynucleotides are presented in Table 5.

[0121] Primers may be provided in double-stranded or single-stranded form, although the single-stranded form is desirable. Probes, while perhaps capable of priming, are designed to bind to a target DNA or RNA and need not be used in an amplification process. In certain embodiments, the probes or primers are labeled with radioactive species ³²P, ¹⁴C, ³⁵S, ³H, or other label), with a fluorophore (e.g., rhodamine, fluorescein) or with a chemillumiscent label (e.g., luciferase).

[0122] The present invention provides substantially full-length cDNA sequences that are useful as markers of sepsis, inSIRS and post-surgical inflammation. It will be understood, however, that the present disclosure is not limited to these disclosed sequences and is intended particularly to encompass at least isolated nucleic acids that are hybridizable to nucleic acids comprising the disclosed sequences or that are variants of these nucleic acids. For example, a nucleic acid of partial sequence may be used to identify a structurally-related gene or the full-length genomic or cDNA clone from which it is derived. Methods for generating cDNA and genomic libraries which may be used as a target for the above-described probes are known in the art (see, for example, Sambrook et al., 1989, supra and Ausubel et al., 1994, supra). All such nucleic acids as well as the specific nucleic acid molecules disclosed herein are collectively referred to as “IRC marker polynucleotides.” Additionally, the present invention includes within its scope isolated or purified polypeptide products of IRC marker polynucleotides.

[0123] As such, the present invention encompasses isolated or substantially purified nucleic acid or protein compositions. An “isolated” or “purified” nucleic acid molecule or protein, or biologically active portion thereof, is substantially or essentially free from components that normally accompany or interact with the nucleic acid molecule or protein as found in its naturally occurring environment. Thus, an isolated or purified polynucleotide or polypeptide is substantially free of other cellular material, or culture medium when produced by recombinant techniques, or substantially free of chemical precursors or other chemicals when chemically synthesized. Suitably, an “isolated” polynucleotide is free of sequences (especially protein encoding sequences) that naturally flank the polynucleotide (i.e., sequences located at the 5′ and 3′ ends of the polynucleotide) in the genomic DNA of the organism from which the polynucleotide was derived. For example, in various embodiments, an isolated IRC marker polynucleotide can contain less than about 5 kb, 4 kb, 3 kb, 2 kb, 1 kb, 0.5 kb, or 0.1 kb of nucleotide sequences that naturally flank the polynucleotide in genomic DNA of the cell from which the polynucleotide was derived. A polypeptide that is substantially free of cellular material includes preparations of protein having less than about 30%, 20%, 10%, 5%, (by dry weight) of contaminating protein. When the IRC marker polypeptide is recombinantly produced, culture medium suitably represents less than about 30%, 20%, 10%, or 5% (by dry weight) of chemical precursors or non-protein-of-interest chemicals.

[0124] The invention also contemplates variants of the IRC marker polynucleotides. Nucleic acid variants can be naturally-occurring, such as allelic variants (same locus), homologues (different locus), and orthologues (different organism) or can be non naturally-occurring. Naturally occurring variants such as these can be identified with the use of well-known molecular biology techniques, as, for example, with polymerase chain reaction (PCR) and hybridization techniques as known in the art. Non-naturally occurring variants can be made by mutagenesis techniques, including those applied to polynucleotides, cells, or organisms. The variants can contain nucleotide substitutions, deletions, inversions and insertions. Variation can occur in either or both the coding and non-coding regions. The variations can produce both conservative and non-conservative amino acid substitutions (as compared in the encoded product). For nucleotide sequences, conservative variants include those sequences that, because of the degeneracy of the genetic code, encode the amino acid sequence of one of the IRC marker polypeptides of the invention. Variant nucleotide sequences also include synthetically derived nucleotide sequences, such as those generated, for example, by using site-directed mutagenesis but which still encode an IRC marker polypeptide of the invention. Generally, variants of a particular nucleotide sequence of the invention will have at least about 70%, 75%, 80%, 85%, desirably about 90%, 91%, 92%, 93%, 94% to 95% or more, and more suitably about 96%, 97%, 98%, 99% or more sequence identity to that particular nucleotide sequence as determined by sequence alignment programs described elsewhere herein using default parameters.

[0125] The IRC marker polynucleotides of the invention can be used to isolate corresponding sequences and alleles from other organisms, particularly other mammals. Methods are readily available in the art for the hybridization of nucleic acid sequences. Coding sequences from other organisms may be isolated according to well known techniques based on their sequence identity with the coding sequences set forth herein. In these techniques all or part of the known coding sequence is used as a probe which selectively hybridizes to other IRC marker polynucleotide coding sequences present in a population of cloned cDNA fragments (i.e., cDNA libraries) from a chosen organism. Accordingly, the present invention also contemplates polynucleotides that hybridize to the IRC marker polynucleotide sequences, or to their complements, under stringency conditions described below. As used herein, the term “hybridizes under low stringency, medium stringency, high stringency, or very high stringency conditions” describes conditions for hybridization and washing. Guidance for performing hybridization reactions can be found in Ausubel et al., (1998, supra), Sections 6.3.1-6.3.6. Aqueous and non-aqueous methods are described in that reference and either can be used. Reference herein to low stringency conditions include and encompass from at least about 1% v/v to at least about 15% v/v formamide and from at least about 1 M to at least about 2 M salt for hybridization at 42° C., and at least about 1 M to at least about 2 M salt for washing at 42° C. Low stringency conditions also may include 1% Bovine Serum Albumin (BSA), 1 mM EDTA, 0.5 M NaHPO₄ (pH 7.2), 7% SDS for hybridization at 65° C., and (i) 2×SSC, 0.1% SDS; or (ii) 0.5% BSA, 1 mM EDTA, 40 mM NaHPO₄ (pH 7.2), 5% SDS for washing at room temperature. One embodiment of low stringency conditions includes hybridization in 6× sodium chloride/sodium citrate (SSC) at about 45° C., followed by two washes in 0.2×SSC, 0.1% SDS at least at 50° C. (the temperature of the washes can be increased to 55° C. for low stringency conditions). Medium stringency conditions include and encompass from at least about 16% v/v to at least about 30% v/v formamide and from at least about 0.5 M to at least about 0.9 M salt for hybridization at 42° C., and at least about 0.1 M to at least about 0.2 M salt for washing at 55° C. Medium stringency conditions also may include 1% Bovine Serum Albumin (BSA), 1 mM EDTA, 0.5 M NaHPO₄ (pH 7.2), 7% SDS for hybridization at 65° C., and (i) 2×SSC, 0.1% SDS; or (ii) 0.5% BSA, 1 mM EDTA, 40 mM NaHPO₄ (pH 7.2), 5% SDS for washing at 60-65° C. One embodiment of medium stringency conditions includes hybridizing in 6×SSC at about 45° C., followed by one or more washes in 0.2×SSC, 0.1% SDS at 60° C. High stringency conditions include and encompass from at least about 31% v/v to at least about 50% v/v formamide and from about 0.01 M to about 0.15 M salt for hybridization at 42° C., and about 0.01 M to about 0.02 M salt for washing at 55° C. High stringency conditions also may include 1% BSA, 1 mM EDTA, 0.5 M NaHPO₄ (pH 7.2), 7% SDS for hybridization at 65° C., and (i) 0.2×SSC, 0.1% SDS; or (ii) 0.5% BSA, 1 mM EDTA, 40 mM NaHPO₄ (pH 7.2), 1% SDS for washing at a temperature in excess of 65° C. One embodiment of high stringency conditions includes hybridizing in 6×SSC at about 45° C., followed by one or more washes in 0.2×SSC, 0.1% SDS at 65° C.

[0126] In certain embodiments, an IRC marker polynucleotide of the invention is encoded by a polynucleotide that hybridizes to a disclosed nucleotide sequence (and suitably comprises a condition-separating exon as defined herein) under very high stringency conditions. One embodiment of very high stringency conditions includes hybridizing 0.5 M sodium phosphate, 7% SDS at 65° C., followed by one or more washes at 0.2×SSC, 1% SDS at 65° C.

[0127] Other stringency conditions are well known in the art and a skilled addressee will recognize that various factors can be manipulated to optimize the specificity of the hybridization. Optimization of the stringency of the final washes can serve to ensure a high degree of hybridization. For detailed examples, see Ausubel et al., supra at pages 2.10.1 to 2.10.16 and Sambrook et al. (1989, supra) at sections 1.101 to 1.104.

[0128] While stringent washes are typically carried out at temperatures from about 42° C. to 68° C., one skilled in the art will appreciate that other temperatures may be suitable for stringent conditions. Maximum hybridization rate typically occurs at about 20° C. to 25° C. below the Tₘ for formation of a DNA-DNA hybrid. It is well known in the art that the Tₘ is the melting temperature, or temperature at which two complementary polynucleotide sequences dissociate. Methods for estimating Tₘ are well known in the art (see Ausubel et al., supra at page 2.10.8). In general, the Tₘ of a perfectly matched duplex of DNA may be predicted as an approximation by the formula:

Tₘ=81.5+16.6(log₁₀ M)+0.41(% G+C)−0.63(% formamide)−(600/length)

[0129] wherein: M is the concentration of Na⁺, preferably in the range of 0.01 molar to 0.4 molar; % G+C is the sum of guanosine and cytosine bases as a percentage of the total number of bases, within the range between 30% and 75% G+C; % formamide is the percent formamide concentration by volume; length is the number of base pairs in the DNA duplex. The Tₘ of a duplex DNA decreases by approximately 1° C. with every increase of 1% in the number of randomly mismatched base pairs. Washing is generally carried out at Tₘ−15° C. for high stringency, or Tₘ−30° C. for moderate stringency.

[0130] In one example of a hybridization procedure, a membrane (e.g., a nitrocellulose membrane or a nylon membrane) containing immobilized DNA is hybridized overnight at 42° C. in a hybridization buffer (50% deionized formamide, 5×SSC, 5×Denhardt's solution (0.1% ficoll, 0.1% polyvinylpyrrolidone and 0.1% bovine serum albumin), 0.1% SDS and 200 mg/mL denatured salmon sperm DNA) containing labeled probe. The membrane is then subjected to two sequential medium stringency washes (i.e., 2×SSC, 0.1% SDS for 15 min at 45° C., followed by 2×SSC, 0.1% SDS for 15 min at 50° C.), followed by two sequential higher stringency washes (i.e., 0.2×SSC, 0.1% SDS for 12 min at 55° C. followed by 0.2×SSC and 0.1% SDS solution for 12 min at 65-68° C.

### 5. Polypeptides of the Invention

[0131] The present invention also contemplates the use of full-length polypeptides encoded by the IRC marker polynucleotides of the invention as well as their fragments, which are referred to collectively herein as “IRC marker polypeptides” for use as positive controls in the methods of the invention. Fragments of full-length IRC marker polypeptides include amino acid sequences encoded by condition-separating exons as defined herein and may comprise 6, 8, 10, 12, 14, 16, 18, 20, 25, 30, 40, 50, 60 amino acid residues in length. For example, fragments contemplated by the present invention are at least 6 and desirably at least 8 amino acid residues in length, which can elicit an immune response in an animal for the production of antigen-binding molecules that are immuno-interactive with an IRC marker polypeptide of the invention. Such antigen-binding molecules can be used to screen vertebrate animals, especially mammals, for structurally and/or functionally related IRC marker polypeptides: Fragments of a full-length IRC marker polypeptide include peptides comprising amino acid sequences sufficiently similar to or derived from the amino acid sequences of a (putative) full-length IRC marker polypeptide, for example, the amino acid sequences shown in SEQ ID NO: 2, 4, 6, 8, 10, 12, 14, 16, 18, 20, 22, 24, 26, 28, 30, 32, 34, 36, 38, 40, 42, 44, 46, 48, 50, 52, 54, 56, 58, 60, 62, 64, 66, 68, 70, 72, 74, 76, 78, 80, 82, 84, 86, 88, 90, 92, 94, 96, 98, 100, 102, 104, 106, 108, 110, 112, 114, 116, 118, 120, 122, 124, 126, 128, 130, 132, 134, 136, 138, 140, 142, 144, 146, 148, 150, 152, 154, 156, 158, 160, 162, 164, 166, 168, 170, 172, 174, 176, 178, 180, 182, 184, 186, 188, 190, 192, 194, 196, 198, 200, 202, 204, 206, 208, 210, 212, 214, 216, 218, 220, 222, 224, 226, 228, 230, 232, 234, 236, 238, 240, 242, 244, 246, 248, 250, 252, 254, 256, 258, 260, 262, 264, 266, 268, 270, 272, 274, 276, 278, 280, 282, 284, 286, 288, 290, 292, 294, 296, 298, 300, 302, 304, 306, 308, 310, 312, 314, 316, 318, 320, 322, 324, 326, 328, 330, 332, 334, 336, 338, 340, 342, 344, 346, 348, 350, 352, 354, 356, 358, 360, 362, 364, 366, 368, 370, 372, 374, 376, 378, 380, 382, 384, 386, 388, 390, 392, 394, 396, 398, 400, 402, 404, 406, 408, 410, 412, 414, 416, 418, 420, 422, 424, 426, 428, 430, 432, 434, 436, 438, 440, 442, 444, 446, 448, 450, 452, 454, 456, 458, 460, 462, 464, 466, 468, 470, 472, 474, 476, 478, 480, 482, 484, 486, 488, 490, 492, 494, 496, 498, 500, 502, 504, 506, 508, 510, 512, 514 or 516, which include less amino acids than a full-length IRC marker polypeptide. A fragment of a full-length IRC marker polypeptide can be a polypeptide which is, for example, 5, 6, 7, 8, 9, 10, 11, 12, 13, 14, 15, 16, 17, 18, 19, 20, 21, 22, 23, 24, 25, 30, 40, 50, 60, 70, 80, 90, 100, 120, 150, 300, 400, 500, 600, 700, 800, 900 or 1000, or even at least about 2000 or 3000, or more amino acid residues in length.

[0132] The present invention also contemplates detecting variant IRC marker polypeptides, which comprise an amino acid sequence encoded by a condition-separating exon or variant thereof, in the methods of the invention. “Variant” polypeptides include proteins derived from the native protein by deletion (so-called truncation) or addition of one or more amino acids to the N-terminal and/or C-terminal end of the native protein; deletion or addition of one or more amino acids at one or more sites in the native protein; or substitution of one or more amino acids at one or more sites in the native protein. Variant proteins encompassed by the present invention are biologically active, that is, they continue to possess the desired biological activity of the native protein. Such variants may result from, for example, genetic polymorphism or from human manipulation. Variants of an IRC marker polypeptide will have at least 40%, 50%, 60%, 70%, generally at least 75%, 80%, 85%, preferably about 90% to 95% or more, and more preferably about 98% or more sequence similarity with the amino acid sequence for a reference IRC polypeptide as determined by sequence alignment programs described elsewhere herein using default parameters. A variant of an IRC polypeptide of the invention may differ from that protein generally by as much 200, 100, 50 or 20 amino acid residues or suitably by as few as 1-15 amino acid residues, as few as 1-10, such as 6-10, as few as 5, as few as 4, 3, 2, or even 1 amino acid residue.

[0133] Variant IRC marker polypeptides may contain conservative amino acid substitutions at various locations along their sequence, as compared to a reference IRC marker amino add sequence. A “conservative amino acid substitution” is one in which the amino acid residue is replaced with an amino acid residue having a similar side chain. Families of amino acid residues having similar side chains have been defined in the art, which can be generally sub-classified as follows:

[0134] Acidic: The residue has a negative charge due to loss of H ion at physiological pH and the residue is attracted by aqueous solution so as to seek the surface positions in the conformation of a peptide in which it is contained when the peptide is in aqueous medium at physiological pH. Amino acids having an acidic side chain include glutamic acid and aspartic acid.

[0135] Basic: The residue has a positive charge due to association with H ion at physiological pH or within one or two pH units thereof (e.g., histidine) and the residue is attracted by aqueous solution so as to seek the surface positions in the conformation of a peptide in which it is contained when the peptide is in aqueous medium at physiological pH. Amino acids having a basic side chain include arginine, lysine and histidine.

[0136] Charged: The residues are charged at physiological pH and, therefore, include amino acids having acidic or basic side chains (i.e., glutamic acid, aspartic acid, arginine, lysine and histidine).

[0137] Hydrophobic: The residues are not charged at physiological pH and the residue is repelled by aqueous solution so as to seek the inner positions in the conformation of a peptide in which it is contained when the peptide is in aqueous medium. Amino acids having a hydrophobic side chain include tyrosine, valine, isoleucine, leucine, methionine, phenylalanine and tryptophan.

[0138] Neutral/polar: The residues are not charged at physiological pH, but the residue is not sufficiently repelled by aqueous solutions so that it would seek inner positions in the conformation of a peptide in which it is contained when the peptide is in aqueous medium. Amino acids having a neutral/polar side chain include asparagine, glutamine, cysteine, histidine, serine and threonine.

[0139] This description also characterizes certain amino acids as “small” since their side chains are not sufficiently large, even if polar groups are lacking, to confer hydrophobicity. With the exception of proline, “small” amino acids are those with four carbons or less when at least one polar group is on the side chain and three carbons or less when not. Amino acids having a small side chain include glycine, serine, alanine and threonine. The gene-encoded secondary amino acid proline is a special case due to its known effects on the secondary conformation of peptide chains. The structure of proline differs from all the other naturally-occurring amino acids in that its side chain is bonded to the nitrogen of the α-amino group, as well as the α-carbon. Several amino acid similarity matrices (e.g., PAM120 matrix and PAM250 matrix as disclosed for example by Dayhoff et al. (1978) A model of evolutionary change in proteins. Matrices for determining distance relationships In M. O. Dayhoff, (ed.), Atlas of protein sequence and structure, Vol. 5, pp. 345-358, National Biomedical Research Foundation, Washington D.C.; and by Gonnet et al., 1992, Science 256(5062): 144301445), however, include proline in the same group as glycine, serine, alanine and threonine. Accordingly, for the purposes of the present invention, proline is classified as a “small” amino acid.

[0140] The degree of attraction or repulsion required for classification as polar or nonpolar is arbitrary and, therefore, amino acids specifically contemplated by the invention have been classified as one or the other. Most amino acids not specifically named can be classified on the basis of known behavior.

[0141] Amino acid residues can be further sub-classified as cyclic or noncyclic, and aromatic or nonaromatic, self-explanatory classifications with respect to the side-chain substituent groups of the residues, and as small or large. The residue is considered small if it contains a total of four carbon atoms or less, inclusive of the carboxyl carbon, provided an additional polar substituent is present; three or less if not. Small residues are, of course, always nonaromatic. Dependent on their structural properties, amino acid residues may fall in two or more classes. For the naturally-occurring protein amino acids, sub-classification according to the this scheme is presented in the Table 6.

[0142] Accordingly, the present invention also contemplates variants of the reference IRC marker polypeptide sequences or their fragments, wherein the variants are distinguished from the reference sequence by the addition, deletion, or substitution of one or more amino acid residues. In general, variants will display at least about 70, 75, 80, 85, 90, 91, 92, 93, 94, 95, 96, 97, 98, 99% similarity to a reference IRC marker polypeptide sequence as, for example, set forth in any one of SEQ ID NO: 2, 4, 6, 8, 10, 12, 14, 16, 18, 20, 22, 24, 26, 28, 30, 32, 34, 36, 38, 40, 42, 44, 46, 48, 50, 52, 54, 56, 58, 60, 62, 64, 66, 68, 70, 72, 74, 76, 78, 80, 82, 84, 86, 88, 90, 92, 94, 96, 98, 100, 102, 104, 106, 108, 110, 112, 114, 116, 118, 120, 122, 124, 126, 128, 130, 132, 134, 136, 138, 140, 142, 144, 146, 148, 150, 152, 154, 156, 158, 160, 162, 164, 166, 168, 170, 172, 174, 176, 178, 180, 182, 184, 186, 188, 190, 192, 194, 196, 198, 200, 202, 204, 206, 208, 210, 212, 214, 216, 218, 220, 222, 224, 226, 228, 230, 232, 234, 236, 238, 240, 242, 244, 246, 248, 250, 252, 254, 256, 258, 260, 262, 264, 266, 268, 270, 272, 274, 276, 278, 280, 282, 284, 286, 288, 290, 292, 294, 296, 298, 300, 302, 304, 306, 308, 310, 312, 314, 316, 318, 320, 322, 324, 326, 328, 330, 332, 334, 336, 338, 340, 342, 344, 346, 348, 350, 352, 354, 356, 358, 360, 362, 364, 366, 368, 370, 372, 374, 376, 378, 380, 382, 384, 386, 388, 390, 392, 394, 396, 398, 400, 402, 404, 406, 408, 410, 412, 414, 416, 418, 420, 422, 424, 426, 428, 430, 432, 434, 436, 438, 440, 442, 444, 446, 448, 450, 452, 454, 456, 458, 460, 462, 464, 466, 468, 470, 472, 474, 476, 478, 480, 482, 484, 486, 488, 490, 492, 494, 496, 498, 500, 502, 504, 506, 508, 510, 512, 514 or 516. Desirably, variants will have at least 70, 75, 80, 85, 90, 91, 92, 93, 94, 95, 96, 97, 98, 99% sequence identity to a reference IRC marker polypeptide sequence as, for example, set forth in any one of SEQ ID NO: 2, 4, 6, 8, 10, 12, 14, 16, 18, 20, 22, 24, 26, 28, 30, 32, 34, 36, 38, 40, 42, 44, 46, 48, 50, 52, 54, 56, 58, 60, 62, 64, 66, 68, 70, 72, 74, 76, 78, 80, 82, 84, 86, 88, 90, 92, 94, 96, 98, 100, 102, 104, 106, 108, 110, 112, 114, 116, 118, 120, 122, 124, 126, 128, 130, 132, 134, 136, 138, 140, 142, 144, 146, 148, 150, 152, 154, 156, 158, 160, 162, 164, 166, 168, 170, 172, 174, 176, 178, 180, 182, 184, 186, 188, 190, 192, 194, 196, 198, 200, 202, 204, 206, 208, 210, 212, 214, 216, 218, 220, 222, 224, 226, 228, 230, 232, 234, 236, 238, 240, 242, 244, 246, 248, 250, 252, 254, 256, 258, 260, 262, 264, 266, 268, 270, 272, 274, 276, 278, 280, 282, 284, 286, 288, 290, 292, 294, 296, 298, 300, 302, 304, 306, 308, 310, 312, 314, 316, 318, 320, 322, 324, 326, 328, 330, 332, 334, 336, 338, 340, 342, 344, 346, 348, 350, 352, 354, 356, 358, 360, 362, 364, 366, 368, 370, 372, 374, 376, 378, 380, 382, 384, 386, 388, 390, 392, 394, 396, 398, 400, 402, 404, 406, 408, 410, 412, 414, 416, 418, 420, 422, 424, 426, 428, 430, 432, 434, 436, 438, 440, 442, 444, 446, 448, 450, 452, 454, 456, 458, 460, 462, 464, 466, 468, 470, 472, 474, 476, 478, 480, 482, 484, 486, 488, 490, 492, 494, 496, 498, 500, 502, 504, 506, 508, 510, 512, 514 or 516. Moreover, sequences differing from the native or reference sequences by the addition, deletion, or substitution of 1, 2, 3, 4, 5, 6, 7, 8, 9, 10, 11, 12, 13, 14, 15, 16, 17, 18, 19, 20, 30, 40, 50, 60, 70, 80, 90, 100, 150, 200, 300, 500 or more amino acids but which comprise an amino acid sequence encoded by a condition-separating exon as defined herein, are contemplated. IRC marker polypeptides also include polypeptides that are encoded by polynucleotides that hybridize under stringency conditions as defined herein, especially high stringency conditions, to the IRC marker polynucleotide sequences of the invention, or to the non-coding strand thereof, as described above, which comprise condition-separating exons.

[0143] In some embodiments, variant polypeptides differ from an IRC marker sequence by at least one but by less than 50, 40, 30, 20, 15, 10, 8, 6, 5, 4, 3 or 2 amino acid residue(s). In other embodiments, variant polypeptides differ from the corresponding sequence in any one of SEQ ID NO: 2, 4, 6, 8, 10, 12, 14, 16, 18, 20, 22, 24, 26, 28, 30, 32, 34, 36, 38, 40, 42, 44, 46, 48, 50, 52, 54, 56, 58, 60, 62, 64, 66, 68, 70, 72, 74, 76, 78, 80, 82, 84, 86, 88, 90, 92, 94, 96, 98, 100, 102, 104, 106, 108, 110, 112, 114, 116, 118, 120, 122, 124, 126, 128, 130, 132, 134, 136, 138, 140, 142, 144, 146, 148, 150, 152, 154, 156, 158, 160, 162, 164, 166, 168, 170, 172, 174, 176, 178, 180, 182, 184, 186, 188, 190, 192, 194, 196, 198, 200, 202, 204, 206, 208, 210, 212, 214, 216, 218, 220, 222, 224, 226, 228, 230, 232, 234, 236, 238, 240, 242, 244, 246, 248, 250, 252, 254, 256, 258, 260, 262, 264, 266, 268, 270, 272, 274, 276, 278, 280, 282, 284, 286, 288, 290, 292, 294, 296, 298, 300, 302, 304, 306, 308, 310, 312, 314, 316, 318, 320, 322, 324, 326, 328, 330, 332, 334, 336, 338, 340, 342, 344, 346, 348, 350, 352, 354, 356, 358, 360, 362, 364, 366, 368, 370, 372, 374, 376, 378, 380, 382, 384, 386, 388, 390, 392, 394, 396, 398, 400, 402, 404, 406, 408, 410, 412, 414, 416, 418, 420, 422, 424, 426, 428, 430, 432, 434, 436, 438, 440, 442, 444, 446, 448, 450, 452, 454, 456, 458, 460, 462, 464, 466, 468, 470, 472, 474, 476, 478, 480, 482, 484, 486, 488, 490; 492, 494, 496, 498, 500, 502, 504, 506, 508, 510, 512, 514 or 516 by at least 1% but less than 20%, 15%, 10% or 5% of the residues. (If this comparison requires alignment the sequences should be aligned for maximum similarity.

[0144] In other embodiments, a variant IRC polypeptide includes an amino acid sequence having at least about 50%, 55%, 60%, 65%, 70%, 75%, 80%, 85%, 90%, 91%, 92%, 93%, 94% 95%, 96%, 97%, 98% or more similarity to a corresponding sequence of an IRC marker polypeptide as, for example, set forth in any one of SEQ ID NO: 2, 4, 6, 8, 10, 12, 14, 16, 18, 20, 22, 24, 26, 28, 30, 32, 34, 36, 38, 40, 42, 44, 46, 48, 50, 52, 54, 56, 58, 60, 62, 64, 66, 68, 70, 72, 74, 76, 78, 80, 82, 84, 86, 88, 90, 92, 94, 96, 98, 100, 102, 104, 106, 108, 110, 112, 114, 116, 118, 120, 122, 124, 126, 128, 130, 132, 134, 136, 138, 140, 142, 144, 146, 148, 150, 152, 154, 156, 158, 160, 162, 164, 166, 168, 170, 172, 174, 176, 178, 180, 182, 184, 186, 188, 190, 192, 194, 196, 198, 200, 202, 204, 206, 208, 210, 212, 214, 216, 218, 220, 222, 224, 226, 228, 230, 232, 234, 236, 238, 240, 242, 244, 246, 248, 250, 252, 254, 256, 258, 260, 262, 264, 266, 268, 270, 272, 274, 276, 278, 280, 282, 284, 286, 288, 290, 292, 294, 296, 298, 300, 302, 304, 306, 308, 310, 312, 314, 316, 318, 320, 322, 324, 326, 328, 330, 332, 334, 336, 338, 340, 342, 344, 346, 348, 350, 352, 354, 356, 358, 360, 362, 364, 366, 368, 370, 372, 374, 376, 378, 380, 382, 384, 386, 388, 390, 392, 394, 396, 398, 400, 402, 404, 406, 408, 410, 412, 414, 416, 418, 420, 422, 424, 426, 428, 430, 432, 434, 436, 438, 440, 442, 444, 446, 448, 450, 452, 454, 456, 458, 460, 462, 464, 466, 468, 470, 472, 474, 476, 478, 480, 482, 484, 486, 488, 490, 492, 494, 496, 498, 500, 502, 504, 506, 508, 510, 512, 514 or 516, and which comprise an amino acid sequence encoded by a condition-separating exon.

[0145] IRC marker polypeptides of the invention may be prepared by any suitable procedure known to those of skill in the art. For example, the polypeptides may be prepared by a procedure including the steps of: (a) preparing a chimeric construct comprising a nucleotide sequence that encodes at least a portion of an IRC marker polynucleotide and that is operably linked to a regulatory element; (b) introducing the chimeric construct into a host cell; (c) culturing the host cell to express the IRC marker polypeptide; and (d) isolating the IRC marker polypeptide from the host cell. In illustrative examples, the nucleotide sequence encodes at least a portion of the sequence set forth in any one of SEQ ID NO: 2, 4, 6, 8, 10, 12, 14, 16, 18, 20, 22, 24, 26, 28, 30, 32, 34, 36, 38, 40, 42, 44, 46, 48, 50, 52, 54, 56, 58, 60, 62, 64, 66, 68, 70, 72, 74, 76, 78, 80, 82, 84, 86, 88, 90, 92, 94, 96, 98, 100, 102, 104, 106, 108, 110, 112, 114, 116, 118, 120, 122, 124, 126, 128, 130, 132, 134, 136, 138, 140, 142, 144, 146, 148, 150, 152, 154, 156, 158, 160, 162, 164, 166, 168, 170, 172, 174, 176, 178, 180, 182, 184, 186, 188, 190, 192, 194, 196, 198, 200, 202, 204, 206, 208, 210, 212, 214, 216, 218, 220, 222, 224, 226, 228, 230, 232, 234, 236, 238, 240, 242, 244, 246, 248, 250, 252, 254, 256, 258, 260, 262, 264, 266, 268, 270, 272, 274, 276, 278, 280, 282, 284, 286, 288, 290, 292, 294, 296, 298, 300, 302, 304, 306, 308, 310, 312, 314, 316, 318, 320, 322, 324, 326, 328, 330, 332, 334, 336, 338, 340, 342, 344, 346, 348, 350, 352, 354, 356, 358, 360, 362, 364, 366, 368, 370, 372, 374, 376, 378, 380, 382, 384, 386, 388, 390, 392, 394, 396, 398, 400, 402, 404, 406, 408, 410, 412, 414, 416, 418, 420, 422, 424, 426, 428, 430, 432, 434, 436, 438, 440, 442, 444, 446, 448, 450, 452, 454, 456, 458, 460, 462, 464, 466, 468, 470, 472, 474, 476, 478, 480, 482, 484, 486, 488, 490, 492, 494, 496, 498, 500, 502, 504, 506, 508, 510, 512, 514 or 516, or a variant thereof.

[0146] The chimeric construct is typically in the form of an expression vector, which is suitably selected from self-replicating extra-chromosomal vectors (e.g., plasmids) and vectors that integrate into a host genome.

[0147] The regulatory element will generally be appropriate for the host cell employed for expression of the IRC marker polynucleotide. Numerous types of expression vectors and regulatory elements are known in the art for a variety of host cells. Illustrative elements of this type include, but are not restricted to, promoter sequences (e.g., constitutive or inducible promoters which may be naturally occurring or combine elements of more than one promoter), leader or signal sequences, ribosomal binding sites, transcriptional start and stop sequences, translational start and termination sequences, and enhancer or activator sequences.

[0148] In some embodiments, the expression vector comprises a selectable marker gene to permit the selection of transformed host cells. Selectable marker genes are well known in the art and will vary with the host cell employed.

[0149] The expression vector may also include a fusion partner (typically provided by the expression vector) so that the IRC marker polypeptide is produced as a fusion polypeptide with the fusion partner.

[0150] The chimeric constructs of the invention are introduced into a host by any suitable means including “transduction” and “transfection”, which are art recognized as meaning the introduction of a nucleic acid, for example, an expression vector, into a recipient cell by nucleic acid-mediated gene transfer. “Transformation,” however, refers to a process in which a host's genotype is changed as a result of the cellular uptake of exogenous DNA or RNA, and, for example, the transformed cell comprises the expression system of the invention. There are many methods for introducing chimeric constructs into cells. Typically, the method employed will depend on the choice of host cell. Technology for introduction of chimeric constructs into host cells is well known to those of skill in the art. Four general classes of methods for delivering nucleic acid molecules into cells have been described: (1) chemical methods such as calcium phosphate precipitation, polyethylene glycol (PEG)-mediated precipitation and lipofection; (2) physical methods such as microinjection, electroporation, acceleration methods and vacuum infiltration; (3) vector based methods such as bacterial and viral vector-mediated transformation; and (4) receptor-mediated. Transformation techniques that fall within these and other classes are well known to workers in the art, and new techniques are continually becoming known. The particular choice of a transformation technology will be determined by its efficiency to transform certain host species as well as the experience and preference of the person practicing the invention with a particular methodology of choice. It will be apparent to the skilled person that the particular choice of a transformation system to introduce a chimeric construct into cells is not essential to or a limitation of the invention, provided it achieves an acceptable level of nucleic acid transfer.

[0151] Recombinant IRC marker polypeptides may be produced by culturing a host cell transformed with a chimeric construct. The conditions appropriate for expression of the IRC marker polynucleotide will vary with the choice of expression vector and the host cell and are easily ascertained by one skilled in the art through routine experimentation. Suitable host cells for expression may be prokaryotic or eukaryotic. An illustrative host cell for expression of a polypeptide of the invention is a bacterium. The bacterium used may be Escherichia coli. Alternatively, the host cell may be a yeast cell or an insect cell such as, for example, SF9 cells that may be utilized with a baculovirus expression system.

[0152] Recombinant IRC marker polypeptides or their fragments that comprise an amino acid sequence encoded by a condition-separating exon, as well as variants thereof, can be conveniently prepared using standard protocols as described for example in Sambrook, et al., (1989, supra), in particular Sections 16 and 17; Ausubel et al., (1994, supra), in particular Chapters 10 and 16; and Coligan et al., CURRENT PROTOCOLS IN PROTEIN SCIENCE (John Wiley & Sons, Inc. 1995-1997), in particular Chapters 1, 5 and 6. Alternatively, the IRC marker polypeptides may be synthesized by chemical synthesis, e.g., using solution synthesis or solid phase synthesis as described, for example, in Chapter 9 of Atherton and Shephard (supra) and in Roberge et al (1995, Science 269: 202).

### 6. Thresholds

[0153] In some embodiments, the methods comprise comparing the level or functional activity of individual expression products to one or more preselected or threshold levels or functional activities. Thresholds may be selected that provide an acceptable ability to predict diagnosis, prognostic risk, treatment success, etc. In illustrative examples, receiver operating characteristic (ROC) curves are calculated by plotting the value of a variable versus its relative frequency in two populations (called arbitrarily, for example, “sepsis” and “inSIRS,” “sepsis” and “post-surgical inflammation,” “sepsis” and “normal,” “inSIRS” and “post-surgical inflammation,” “inSIRS” and “normal,” “post-surgical inflammation” and “normal,” or simply “disease” and “normal” or “low risk” and “high risk”).

[0154] For any particular IRC marker expression product, a distribution of expression product levels or functional activities for subjects with and without a disease will likely overlap. Under such conditions, a test does not absolutely distinguish “disease” and “normal” with 100% accuracy, and the area of overlap indicates where the test cannot distinguish “disease” and “normal.” A threshold is selected, above which (or below which, depending on how an IRC marker expression product changes with the disease or prognosis) the test is considered to be “positive” and below which the test is considered to be “negative.” The area under the ROC curve is a measure of the probability that the perceived measurement will allow correct identification of a condition (see, e.g., Hanley et al., Radiology 143: 29-36 (1982). Alternatively, or in addition, thresholds may be established by obtaining an earlier marker gene expression product result from the same patient, to which later results may be compared. In these embodiments, the individual in effect acts as their own “control group.” In markers that increase with disease severity or prognostic risk, an increase over time in the same patient can indicate a worsening of disease or a failure of a treatment regimen, while a decrease over time can indicate remission of disease or success of a treatment regimen.

[0155] In certain embodiments, a panel of IRC marker expression products is selected to distinguish any pair of groups selected from “sepsis” and “inSIRS,” “sepsis” and “post-surgical inflammation,” “sepsis” and “normal,” “inSIRS” and “post-surgical inflammation,” “inSIRS” and “normal,” “post-surgical inflammation” and “normal,” “disease” and “normal” or “low risk” and “high risk” with at least about 70%, 80%, 85%, 90% or 95% sensitivity, suitably in combination with at least about 70% 80%, 85%, 90% or 95% specificity. In some embodiments, both the sensitivity and specificity are at least about 75%, 80%, 85%, 90% or 95%.

[0156] In some embodiments, a positive likelihood ratio, negative likelihood ratio, odds ratio, or hazard ratio is used as a measure of the ability of the methods of the present invention to predict disease, prognostic risk, or treatment outcome. In the case of a positive likelihood ratio, a value of 1 indicates that a positive result is equally likely among subjects in both the diseased group (e.g., one of sepsis, inSIRS or post-surgical inflammation) and control group (e.g., one of sepsis, inSIRS or post-surgical inflammation, which is other than the diseased group, or normal); a value greater than 1 indicates that a positive result is more likely in the diseased group; and a value less than 1 indicates that a positive result is more likely in the control group. In the case of a negative likelihood ratio, a value of 1 indicates that a negative result is equally likely among subjects in both groups; a value greater than 1 indicates that a negative result is more likely in the diseased group; and a value less than 1 indicates that a negative result is more likely in the control group. In certain embodiments, IRC markers and/or IRC marker panels are selected to exhibit a positive or negative likelihood ratio of at least about 1.5 or more or about 0.67 or less, at least about 2 or more or about 0.5 or less, at least about 5 or more or about 0.2 or less, at least about 10 or more or about 0.1 or less, or at least about 20 or more or about 0.05 or less.

[0157] In the case of an odds ratio, a value of 1 indicates that a positive result is equally likely among subjects in both the diseased and control groups; a value greater than 1 indicates that a positive result is more likely in the diseased group; and a value less than 1 indicates that a positive result is more likely in the control group. In certain embodiments, IRC markers and/or IRC marker panels are selected to exhibit an odds ratio of at least about 2 or more or about 0.5 or less, at least about 3 or more or about 0.33 or less, at least about 4 or more or about 0.25 or less, at least about 5 or more or about 0.2 or less, or at least about 10 or more or about 0.1 or less.

[0158] In the case of a hazard ratio, a value of 1 indicates that the relative risk is equal in both the diseased and control groups; a value greater than 1 indicates that the risk is greater in the diseased group; and a value less than 1 indicates that the risk is greater in the control group. In certain embodiments, IRC markers and/or IRC marker panels are selected to exhibit a hazard ratio of at least about 1.1 or more or about 0.91 or less, at least about 1.25 or more or about 0.8 or less, at least about 1.5 or more or about 0.67 or less, at least about 2 or more or about 0.5 or less, or at least about 2.5 or more or about 0.4 or less.

[0159] In some cases, multiple thresholds may be determined in so-called “tertile,” “quartile,” or “quintile” analyses. In these methods, the “diseased” and “control groups” (or “high risk” and “low risk”) groups are considered together as a single population, and are divided into 3, 4, or 5 (or more) “bins” having equal numbers of individuals. The boundary between two of these “bins” may be considered “thresholds.” A risk (of a particular diagnosis or prognosis for example) can be assigned based on which “bin” a test subject falls into.

[0160] In other embodiments, particular thresholds for the IRC marker(s) measured are not relied upon to determine if the marker level(s) obtained from a subject are correlated to a particular diagnosis or prognosis, For example, a temporal change in the marker(s) can be used to rule in or out one or more particular diagnoses and/or prognoses. Alternatively, IRC marker(s) are correlated to a condition, disease, prognosis, etc., by the presence or absence of the IRC marker(s) in a particular assay format. In the case of IRC marker panels, the present invention may utilize an evaluation of the entire profile of IRC markers to provide a single result value (e.g., a “panel response” value expressed either as a numeric score or as a percentage risk). In such embodiments, an increase, decrease, or other change (e.g., slope over time) in a certain subset of IRC markers may be sufficient to indicate a particular condition or future outcome in one patient, while an increase, decrease, or other change in a different subset of IRC markers may be sufficient to indicate the same or a different condition or outcome in another patient.

### 7. Methods of Detecting Aberrant IRC Marker Gene Expression

[0161] The present invention is predicated in part on the discovery that subjects with clinical evidence of sepsis, inSIRS and post-surgical inflammation have aberrant expression of certain genes (referred to herein as “IRC marker genes”) whose transcripts include, but are not limited to: SEQ ID NO: 1, 3, 5, 7, 9, 11, 13, 15, 17, 19, 21, 23, 25, 27, 29, 31, 33, 35, 37, 39, 41, 43, 45, 47, 49, 51, 53, 55, 57, 59, 61, 63, 65, 67, 69, 71, 73, 75, 77, 79, 81, 83, 85, 87, 89, 91, 93, 95, 97, 99; 101, 103, 105, 107, 109, 111, 113, 115, 117, 119, 121, 123, 125, 127, 129, 131, 133, 135, 137, 139, 141, 143, 145, 147, 149, 151, 153, 155, 157, 159, 161, 163, 165, 167, 169, 171, 173, 175, 177, 179, 181, 183, 185, 187, 189, 191, 193, 195, 197, 199, 201, 203, 205, 207, 209, 211, 213, 215, 217, 219, 221, 223, 225, 227, 229, 231, 233, 235, 237, 239, 241, 243, 245, 247, 249, 251, 253, 255, 257, 259, 261, 263, 265, 267, 269, 271, 273, 275, 277, 279, 281, 283, 285, 287, 289, 291, 293, 295, 297, 299, 301, 303, 305, 307, 309, 311, 313, 315, 317, 319, 321, 323, 325, 327, 329, 331, 333, 335, 337, 339, 341, 343, 345, 347, 349, 351, 353, 355, 357, 359, 361, 363, 365, 367, 369, 371, 373, 375, 377, 379, 381, 383, 385, 387, 389, 391, 393, 395, 397, 399, 401, 403, 405, 407, 409, 411, 413, 415, 417, 419, 421, 423, 425, 427, 429, 431, 433, 435, 437, 439, 441, 443, 445, 447, 449, 451, 453, 455, 457, 459, 461, 463, 465, 467, 469, 471, 473, 475, 477, 479, 481, 483, 485, 487, 489, 491, 493, 495, 497, 499, 501, 503, 505, 507, 509, 511, 513 or 515, as compared to one or more control subjects selected from normal (i.e., healthy) subjects, sepsis-negative subjects, inSIRS-negative subjects, post surgical inflammation-negative subjects, sepsis-negative, inSIRS-negative subjects, sepsis-negative, post surgical inflammation-negative subjects, inSIRS-negative, post surgical inflammation-negative subjects, sepsis-positive subjects, inSIRS-positive subjects and post-surgical inflammation-positive subject. In some embodiments, at least two subjects forming a control or reference population are used for the comparison. For example, the control or reference populations may be chosen from individuals who do not have post-surgical inflammation (“post-surgical inflammation-negative”), from individuals who do not have inSIRS (“inSIRS-negative”), from individuals who do not have inSIRS but who are suffering from an infectious process, from individuals who are suffering from post-surgical inflammation without the presence of inSIRS or sepsis (“post-surgical inflammation-positive”), from individuals who are suffering from inSIRS without the presence of sepsis (“inSIRS-positive”), from individuals who are suffering from the onset of sepsis, from individuals who are sepsis-positive and suffering from one of the stages in the progression of sepsis, or from individuals with a physiological trauma that increases the risk of developing sepsis. The control or reference populations may be post-surgical inflammation-positive and are subsequently diagnosed with inSIRS using conventional techniques. For example, a population of post-surgical inflammation-positive patients used to generate the reference profile may be diagnosed with inSIRS about 24, 48, 72, 96 or more hours after biological samples are taken from them for the purposes of generating a reference IRC marker profile. In some embodiments, the population of post-surgical inflammation-positive individuals is diagnosed with inSIRS using conventional techniques about 0-36 hours, about 36-60 hours, about 60-84 hours, or about 84-108 hours after the biological samples are taken. If the marker profile is indicative of inSIRS or one of its stages of progression, a clinician may begin treatment prior to the manifestation of clinical symptoms.

[0162] In other embodiments, the control or reference populations may be inSIRS-positive and are subsequently diagnosed with sepsis using convention techniques. For example, a population of inSIRS-positive patients used to generate the reference profile may be diagnosed with sepsis about 24, 48, 72, 96 or more hours after biological samples are taken from them for the purposes of generating a reference IRC marker profile. In some embodiments, the population of inSIRS-positive individuals is diagnosed with sepsis using conventional techniques about 0-36 hours, about 36-60 hours, about 60-84 hours, or about 84-108 hours after the biological samples are taken. If the marker profile is indicative of sepsis or one of its stages of progression, a clinician may begin treatment prior to the manifestation of clinical symptoms of sepsis. Treatment typically will involve examining the patient to determine the source of the infection. Once locating the source, the clinician typically will obtain cultures from the site of the infection, suitably before beginning relevant empirical antimicrobial therapy and perhaps additional adjunctive therapeutic measures, such as draining an abscess or removing an infected catheter.

[0163] In accordance with the present invention, comparing the level of at one IRC marker expression product in a subject to the level of a corresponding IRC marker expression product in a control subject selected for example from a normal subject, a sepsis-positive subject, an inSIRS-positive subjects and a post-surgical inflammation-positive subject indicates whether the subject under test is normal or has or is at risk of developing post-surgical inflammation, inSIRS or sepsis.

[0164] Accordingly, in certain embodiments, the invention features a method for diagnosing the presence or absence of a plurality of conditions selected from post-surgical inflammation, inSIRS or sepsis, or for distinguishing between those conditions in a subject by detecting differential expression of an IRC marker expression product between a test subject and a control subject. Accordingly, in order to make such diagnoses, it is desirable to qualitatively or quantitatively determine the levels of IRC marker transcripts or the level or functional activity of IRC marker polypeptides. In some embodiments, the presence or absence of post-surgical inflammation, inSIRS or sepsis, or differentiation between post-surgical inflammation, inSIRS and sepsis, is determined when an IRC marker expression product is expressed at a detectably lower level in a biological sample obtained from the test subject than the level at which a corresponding IRC expression product is expressed in a reference sample obtained from a control subject. In other embodiments, the presence or absence of post-surgical inflammation, inSIRS or sepsis, or differentiation between post-surgical inflammation, inSIRS and sepsis, is determined when na IRC marker expression product is expressed at a detectably higher level in a biological sample obtained from the test subject than the level at which a corresponding IRC expression product is expressed in a reference sample obtained from a control subject. Generally, such diagnoses are made when the level or functional activity of an IRC marker expression product in the biological sample varies from the level or functional activity of a corresponding IRC marker expression product in the reference sample by at least 10%, 20%, 30%, 40%, 50%, 60%, 70%, 80%, 90%, 92%, 94%, 96%, 97%, 98% or 99%, or even by at least about 99.5%, 99.9%, 99.95%, 99.99%, 99.995% or 99.999%, or even by at least about 100%, 200%, 300%, 400%, 500%, 600%, 700%, 800%, 900% or 1000%. The corresponding IRC marker expression product is generally selected from the same IRC marker expression product that is present in the biological sample, an IRC expression product expressed from a variant gene (e.g., an homologous or orthologous gene) including an allelic variant, or a splice variant or protein product thereof. In some embodiments, the method comprises measuring the level of 1, 2, 3, 4, 5, 6, 7, 8, 9, 10, 11, 12, 13, 14, 15, 16, 17, 18, 19, 20, 21, 22, 23 or 24 IRC marker expression products from an IRC multi-transcript-producing gene selected from ANKDD1A, GABRR2, OTX1, PANX2, RHBDF2, SLAMF7, AMBRA1, CES2, CLPB, HIPK2, C1ORF91, NDST1, SLC36A1, ADAM19, CUL7, TG, PDCD1LG2, GRINL1A, MGRN1, SNTB2, CDK5R1, GAA, KATNAL2, CEACAM4, ZNF335, ASPHD2, ACRC, BTNL8, MOV10, MED12L, KLHL6, PDLIM5, GALNT10, SCRN1, VOPP1, FKBP9, KIF27, PIWIL4, TEP1, GCH1, PRR11, CDH2, PPM1N, RRAS, DDOST, APH1A, TTL, TEX261, COQ2, FCHSD1, BAK1, SLC25A25, RELT, ACP2, TBC1D2B, FANCA or SLC39A11, either alone or in combination with as much as 1, 2, 3, 4, 5, 6, 7, 8, 9, 10, 11, 12, 13, 14, 15, 16, 17, 18, 19, 20, 21, 22, 23 or 24 individual IRC marker expression products from each of 56, 55, 54, 53, 52, 51, 50, 49, 48, 47, 46, 45, 44, 43, 42, 41, 40, 39, 38, 37, 36, 35, 34, 33, 32, 31, 30, 29, 28, 27, 26, 25, 24, 23, 22, 21, 19, 18, 17, 16, 15, 14, 13, 12, 11, 10, 9, 8, 7, 6, 5, 4, 3 or 2 IRC multi-transcript-producing genes or from 1 other IRC multi-transcript-producing gene.

[0165] In other embodiments, the methods comprise measuring the level of one or more IRC marker polypeptides from at least one IRC multi-transcript-producing gene as defined herein, either alone or in combination with as much as 1, 2, 3, 4, 5, 6, 7, 8, 9, 10, 11 or 12 individual IRC marker polypeptides expressed from 56, 55, 54, 53, 52, 51, 50, 49, 48, 47, 46, 45, 44, 43, 42, 41, 40, 39, 38, 37, 36, 35, 34, 33, 32, 31, 30, 29, 28, 27, 26, 25, 24, 23, 22, 21, 19, 18, 17, 16, 15, 14, 13, 12, 11, 10, 9, 8, 7, 6, 5, 4, 3, 2 or 1 other IRC multi-transcript-producing gene(s).

[0166] Generally, the biological sample contains blood, especially peripheral blood, or a fraction or extract thereof. Typically, the biological sample comprises blood cells such as mature, immature and developing leukocytes, including lymphocytes, polymorphonuclear leukocytes, neutrophils, monocytes, reticulocytes, basophils, coelomocytes, hemocytes, eosinophils, megakaryocytes, macrophages, dendritic cells natural killer cells, or fraction of such cells (e.g., a nucleic acid or protein fraction). In specific embodiments, the biological sample comprises leukocytes including peripheral blood mononuclear cells (PBMC).

[0167] 7.1 Nucleic Acid-Based Diagnostics

[0168] Nucleic acid used in polynucleotide-based assays can be isolated from cells contained in the biological sample, according to standard methodologies (Sambrook, et al., 1989, supra; and Ausubel et al., 1994, supra). The nucleic acid is typically fractionated (e.g., poly A⁺ RNA) or whole cell RNA. Where RNA is used as the subject of detection, it may be desired to convert the RNA to a complementary DNA. In some embodiments, the nucleic acid is amplified by a template-dependent nucleic acid amplification technique. A number of template dependent processes are available to amplify the IRC marker sequences present in a given template sample. An exemplary nucleic acid amplification technique is the polymerase chain reaction (referred to as PCR) which is described in detail in U.S. Pat. Nos. 4,683,195, 4,683,202 and 4,800,159, Ausubel et al. (supra), and in Innis et al., (“PCR Protocols”, Academic Press, Inc., San Diego Calif., 1990). Briefly, in PCR, two primer sequences are prepared that are complementary to regions on opposite complementary strands of the marker sequence. An excess of deoxynucleoside triphosphates are added to a reaction mixture along with a DNA polymerase, e.g., Taq polymerase. If a cognate IRC marker sequence is present in a sample, the primers will bind to the marker and the polymerase will cause the primers to be extended along the marker sequence by adding on nucleotides. By raising and lowering the temperature of the reaction mixture, the extended primers will dissociate from the marker to form reaction products, excess primers will bind to the marker and to the reaction products and the process is repeated. A reverse transcriptase PCR amplification procedure may be performed in order to quantify the amount of mRNA amplified. Methods of reverse transcribing RNA into cDNA are well known and described in Sambrook et al., 1989, supra. Alternative methods for reverse transcription utilize thermostable, RNA-dependent DNA polymerases. These methods are described in WO 90/07641. Polymerase chain reaction methodologies are well known in the art.

[0169] In certain advantageous embodiments, the template-dependent amplification involves quantification of transcripts in real-time. For example, RNA or DNA may be quantified using the Real-Time PCR technique (Higuchi, 1992, et al., Biotechnology 10: 413-417). By determining the concentration of the amplified products of the target DNA in PCR reactions that have completed the same number of cycles and are in their linear ranges, it is possible to determine the relative concentrations of the specific target sequence in the original DNA mixture. If the DNA mixtures are cDNAs synthesized from RNAs isolated from different tissues or cells, the relative abundance of the specific mRNA from which the target sequence was derived can be determined for the respective tissues or cells. This direct proportionality between the concentration of the PCR products and the relative mRNA abundance is only true in the linear range of the PCR reaction. The final concentration of the target DNA in the plateau portion of the curve is determined by the availability of reagents in the reaction mix and is independent of the original concentration of target DNA. In specific embodiments, multiplexed, tandem PCR (MT-PCR) is employed, which uses a two-step process for gene expression profiling from small quantities of RNA or DNA, as described for example in US Pat. Appl. Pub. No. 20070190540. In the first step, RNA is converted into cDNA and amplified using multiplexed gene specific primers. In the second step each individual gene is quantitated by real time PCR.

[0170] Another method for amplification is the ligase chain reaction (“LCR”), disclosed in EPO No. 320 308. In LCR, two complementary probe pairs are prepared, and in the presence of the target sequence, each pair will bind to opposite complementary strands of the target such that they abut. In the presence of a ligase, the two probe pairs will link to form a single unit. By temperature cycling, as in PCR, bound ligated units dissociate from the target and then serve as “target sequences” for ligation of excess probe pairs. U.S. Pat. No. 4,883,750 describes a method similar to LCR for binding probe pairs to a target sequence.

[0171] Qβ Replicase, described in PCT Application No. PCT/US87/00880, may also be used. In this method, a replicative sequence of RNA that has a region complementary to that of a target is added to a sample in the presence of an RNA polymerase. The polymerase will copy the replicative sequence that can then be detected.

[0172] An isothermal amplification method, in which restriction endonucleases and ligases are used to achieve the amplification of target molecules that contain nucleotide 5′α-thio-triphosphates in one strand of a restriction site may also be useful in the amplification of nucleic acids in the present invention, Walker et al., (1992, Proc. Natl. Acad. Sci. U.S.A 89: 392-396).

[0173] Strand Displacement Amplification (SDA) is another method of carrying out isothermal amplification of nucleic acids which involves multiple rounds of strand displacement and synthesis, i.e., nick translation. A similar method, called Repair Chain Reaction (RCR), involves annealing several probes throughout a region targeted for amplification, followed by a repair reaction in which only two of the four bases are present. The other two bases can be added as biotinylated derivatives for easy detection. A similar approach is used in SDA. Target specific sequences can also be detected using a cyclic probe reaction (CPR). In CPR, a probe having 3′ and 5′ sequences of non-specific DNA and a middle sequence of specific RNA is hybridized to DNA that is present in a sample. Upon hybridization, the reaction is treated with RNase H, and the products of the probe identified as distinctive products that are released after digestion. The original template is annealed to another cycling probe and the reaction is repeated.

[0174] Still another amplification method described in GB Application No. 2 202 328, and in PCT Application No. PCT/US89/01025, may be used. In the former application, “modified” primers are used in a PCR-like, template- and enzyme-dependent synthesis. The primers may be modified by labeling with a capture moiety (e.g., biotin) and/or a detector moiety (e.g., enzyme). In the latter application, an excess of labeled probes are added to a sample. In the presence of the target sequence, the probe binds and is cleaved catalytically. After cleavage, the target sequence is released intact to be bound by excess probe. Cleavage of the labelled probe signals the presence of the target sequence.

[0175] Other nucleic acid amplification procedures include transcription-based amplification systems (TAS), including nucleic acid sequence based amplification (NASBA) and 3SR (Kwoh et al., 1989, Proc. Natl. Acad. Sci. U.S.A., 86: 1173; Gingeras et al., PCT Application WO 88/10315). In NASBA, the nucleic acids can be prepared for amplification by standard phenol/chloroform extraction, heat denaturation of a clinical sample, treatment with lysis buffer and minispin columns for isolation of DNA and RNA or guanidinium chloride extraction of RNA. These amplification techniques involve annealing a primer which has target specific sequences. Following polymerization, DNA/RNA hybrids are digested with RNase H while double stranded DNA molecules are heat denatured again. In either case the single stranded DNA is made fully double stranded by addition of second target specific primer, followed by polymerization. The double-stranded DNA molecules are then multiply transcribed by an RNA polymerase such as T7 or SP6. In an isothermal cyclic reaction, the RNAs are reverse transcribed into single stranded DNA, which is then converted to double stranded DNA, and then transcribed once again with an RNA polymerase such as T7 or SP6. The resulting products, whether truncated or complete, indicate target specific sequences.

[0176] Vincent and Kong disclose a method termed helicase-dependent isothermal DNA amplification (HDA) (Vincent and Kong, EMBO Reports, 5(8):795-800, 2004). This method uses DNA helicase to separate DNA strands and hence does not require thermal cycling. The entire reaction can be carried out at one temperature and this method should have broad application to point-of-care DNA diagnostics.

[0177] Davey et al., EPO No. 329 822 disclose a nucleic acid amplification process involving cyclically synthesizing single-stranded RNA (“ssRNA”), ssDNA, and double-stranded DNA (dsDNA), which may be used in accordance with the present invention. The ssRNA is a template for a first primer oligonucleotide, which is elongated by reverse transcriptase (RNA-dependent DNA polymerase). The RNA is then removed from the resulting DNA:RNA duplex by the action of ribonuclease H(RNase H, an RNase specific for RNA in duplex with either DNA or RNA). The resultant ssDNA is a template for a second primer, which also includes the sequences of an RNA polymerase promoter (exemplified by T7 RNA polymerase) 5′ to its homology to the template. This primer is then extended by DNA polymerase (exemplified by the large “Klenow” fragment of E. coli DNA polymerase I), resulting in a double-stranded DNA (“dsDNA”) molecule, having a sequence identical to that of the original RNA between the primers and having additionally, at one end, a promoter sequence. This promoter sequence can be used by the appropriate RNA polymerase to make many RNA copies of the DNA. These copies can then re-enter the cycle leading to very swift amplification. With proper choice of enzymes, this amplification can be done isothermally without addition of enzymes at each cycle. Because of the cyclical nature of this process, the starting sequence can be chosen to be in the form of either DNA or RNA.

[0178] Miller et al. in PCT Application WO 89/06700 disclose a nucleic acid sequence amplification scheme based on the hybridization of a promoter/primer sequence to a target single-stranded DNA (“ssDNA”) followed by transcription of many RNA copies of the sequence. This scheme is not cyclic, i.e., new templates are not produced from the resultant RNA transcripts. Other amplification methods include “RACE” and “one-sided PCR” (Frohman, M. A., In: “PCR Protocols: A Guide to Methods and Applications”, Academic Press, N.Y., 1990; Ohara et al., 1989, Proc. Natl. Acad. Sci. U.S.A., 86: 5673-567).

[0179] Methods based on ligation of two (or more) oligonucleotides in the presence of nucleic acid having the sequence of the resulting “di-oligonucleotide”, thereby amplifying the di-oligonucleotide, may also be used for amplifying target nucleic acid sequences. Wu et al., (1989, Genomics 4: 560).

[0180] Depending on the format, the IRC marker nucleic acid of interest is identified in the sample directly using a template-dependent amplification as described, for example, above, or with a second, known nucleic acid following amplification. Next, the identified product is detected. In certain applications, the detection may be performed by visual means (e.g., ethidium bromide staining of a gel). Alternatively, the detection may involve indirect identification of the product via chemiluminescence, radioactive scintigraphy of radiolabel or fluorescent label or even via a system using electrical or thermal impulse signals (Affymax Technology; Bellus, 1994, J Macromol. Sci. Pure, Appl. Chem., A31(1): 1355-1376).

[0181] In some embodiments, amplification products or “amplicons” are visualized in order to confirm amplification of the IRC marker sequences. One typical visualization method involves staining of a gel with ethidium bromide and visualization under UV light. Alternatively, if the amplification products are integrally labeled with radio- or fluorometrically-labelled nucleotides, the amplification products can then be exposed to x-ray film or visualized under the appropriate stimulating spectra, following separation. In some embodiments, visualization is achieved indirectly. Following separation of amplification products, a labeled nucleic acid probe is brought into contact with the amplified IRC marker sequence. The probe is suitably conjugated to a chromophore but may be radiolabeled. Alternatively, the probe is conjugated to a binding partner, such as an antigen-binding molecule, or biotin, and the other member of the binding pair carries a detectable moiety or reporter molecule. The techniques involved are well known to those of skill in the art and can be found in many standard texts on molecular protocols (e.g., see Sambrook et al., 1989, supra and Ausubel et al. 1994, supra). For example, chromophore or radiolabel probes or primers identify the target during or following amplification.

[0182] In certain embodiments, target nucleic acids are quantified using blotting techniques, which are well known to those of skill in the art. Southern blotting involves the use of DNA as a target, whereas Northern blotting involves the use of RNA as a target. Each provide different types of information, although cDNA blotting is analogous, in many aspects, to blotting or RNA species. Briefly, a probe is used to target a DNA or RNA species that has been immobilized on a suitable matrix, often a filter of nitrocellulose. The different species should be spatially separated to facilitate analysis. This often is accomplished by gel electrophoresis of nucleic acid species followed by “blotting” on to the filter. Subsequently, the blotted target is incubated with a probe (usually labeled) under conditions that promote denaturation and rehybridization. Because the probe is designed to base pair with the target, the probe will bind a portion of the target sequence under renaturing conditions. Unbound probe is then removed, and detection is accomplished as described above.

[0183] Following detection/quantification, one may compare the results seen in a given subject with a control reaction or a statistically significant reference group or population of control subjects as defined herein. In this way, it is possible to correlate the amount of a IRC marker nucleic acid detected with the progression or severity of the disease.

[0184] Also contemplated are genotyping methods and allelic discrimination methods and technologies such as those described by Kristensen et al. (Biotechniques 30(2): 318-322), including the use of single nucleotide polymorphism analysis, high performance liquid chromatography, TaqMan®, liquid chromatography, and mass spectrometry.

[0185] Also contemplated are biochip-based technologies such as those described by Hacia et al. (1996, Nature Genetics 14: 441-447) and Shoemaker et al. (1996, Nature Genetics 14: 450-456). Briefly, these techniques involve quantitative methods for analysing large numbers of genes rapidly and accurately. By tagging genes with oligonucleotides or using fixed probe arrays, one can employ biochip technology to segregate target molecules as high density arrays and screen these molecules on the basis of hybridization. See also Pease et al. (1994, Proc. Natl. Acad. Sci. U.S.A. 91: 5022-5026); Fodor et al. (1991, Science 251: 767-773). Briefly, nucleic acid probes to IRC marker polynucleotides are made and attached to biochips to be used in screening and diagnostic methods, as outlined herein. The nucleic acid probes attached to the biochip are designed to be substantially complementary to specific expressed IRC marker nucleic acids, i.e., the target sequence (either the target sequence of the sample or to other probe sequences, for example in sandwich assays), such that hybridization of the target sequence and the probes of the present invention occurs. This complementarity need not be perfect; there may be any number of base pair mismatches which will interfere with hybridization between the target sequence and the nucleic acid probes of the present invention. However, if the number of mismatches is so great that no hybridization can occur under even the least stringent of hybridization conditions, the sequence is not a complementary target sequence. In certain embodiments, more than one probe per sequence is used, with either overlapping probes or probes to different sections of the target being used. That is, two, three, four or more probes, with three being desirable, are used to build in a redundancy for a particular target. The probes can be overlapping (i.e. have some sequence in common), or separate.

[0186] As will be appreciated by those of ordinary skill in the art, nucleic acids can be attached to or immobilized on a solid support in a wide variety of ways. By “immobilized” and grammatical equivalents herein is meant the association or binding between the nucleic acid probe and the solid support is sufficient to be stable under the conditions of binding, washing, analysis, and removal as outlined below. The binding can be covalent or non-covalent. By “non-covalent binding” and grammatical equivalents herein is meant one or more of either electrostatic, hydrophilic, and hydrophobic interactions. Included in non-covalent binding is the covalent attachment of a molecule, such as, streptavidin to the support and the non-covalent binding of the biotinylated probe to the streptavidin. By “covalent binding” and grammatical equivalents herein is meant that the two moieties, the solid support and the probe, are attached by at least one bond, including sigma bonds, pi bonds and coordination bonds. Covalent bonds can be formed directly between the probe and the solid support or can be formed by a cross linker or by inclusion of a specific reactive group on either the solid support or the probe or both molecules. Immobilization may also involve a combination of covalent and non-covalent interactions.

[0187] In general, the probes are attached to the biochip in a wide variety of ways, as will be appreciated by those in the art. As described herein, the nucleic acids can either be synthesized first, with subsequent attachment to the biochip, or can be directly synthesized on the biochip.

[0188] The biochip comprises a suitable solid or semi-solid substrate or solid support. By “substrate” or “solid support” is meant any material that can be modified to contain discrete individual sites appropriate for the attachment or association of the nucleic acid probes and is amenable to at least one detection method. As will be appreciated by practitioners in the art, the number of possible substrates are very large, and include, but are not limited to, glass and modified or functionalised glass, plastics (including acrylics, polystyrene and copolymers of styrene and other materials, polypropylene, polyethylene, polybutylene, polyurethanes, Teflon™, etc.), polysaccharides, nylon or nitrocellulose, resins, silica or silica-based materials including silicon and modified silicon, carbon, metals, inorganic glasses, plastics, etc. In general, the substrates allow optical detection and do not appreciably fluorescese.

[0189] Generally the substrate is planar, although as will be appreciated by those of skill in the art, other configurations of substrates may be used as well. For example, the probes may be placed on the inside surface of a tube, for flow-through sample analysis to minimize sample volume. Similarly, the substrate may be flexible, such as a flexible foam, including closed cell foams made of particular plastics.

[0190] In certain embodiments, oligonucleotides probes are synthesized on the substrate, as is known in the art. For example, photoactivation techniques utilizing photopolymerisation compounds and techniques can be used. In an illustrative example, the nucleic acids are synthesized in situ, using well known photolithographic techniques, such as those described in WO 95/25116; WO 95/35505; U.S. Pat. Nos. 5,700,637 and 5,445,934; and references cited within; these methods of attachment form the basis of the Affymetrix GeneChip™ technology.

[0191] In an illustrative biochip analysis, oligonucleotide probes on the biochip are exposed to or contacted with a nucleic acid sample suspected of containing one or more IRC marker polynucleotides under conditions favoring specific hybridization. Sample extracts of DNA or RNA, either single or double-stranded, may be prepared from fluid suspensions of biological materials, or by grinding biological materials, or following a cell lysis step which includes, but is not limited to, lysis effected by treatment with SDS (or other detergents), osmotic shock, guanidinium isothiocyanate and lysozyme. Suitable DNA, which may be used in the method of the invention, includes cDNA. Such DNA may be prepared by any one of a number of commonly used protocols as for example described in Ausubel, et al., 1994, supra, and Sambrook, et al., et al., 1989, supra.

[0192] Suitable RNA, which may be used in the method of the invention, includes messenger RNA, complementary RNA transcribed from DNA (cRNA) or genomic or subgenomic RNA. Such RNA may be prepared using standard protocols as for example described in the relevant sections of Ausubel, et al. 1994, supra and Sambrook, et al. 1989, supra).

[0193] cDNA may be fragmented, for example, by sonication or by treatment with restriction endonucleases. Suitably, cDNA is fragmented such that resultant DNA fragments are of a length greater than the length of the immobilized oligonucleotide probe(s) but small enough to allow rapid access thereto under suitable hybridization conditions. Alternatively, fragments of cDNA may be selected and amplified using a suitable nucleotide amplification technique, as described for example above, involving appropriate random or specific primers.

[0194] Usually the target IRC marker polynucleotides are detectably labeled so that their hybridization to individual probes can be determined. The target polynucleotides are typically detectably labeled with a reporter molecule illustrative examples of which include chromogens, catalysts, enzymes, fluorochromes, chemiluminescent molecules, bioluminescent molecules, lanthanide ions (e.g., Eu³⁴), a radioisotope and a direct visual label. In the case of a direct visual label, use may be made of a colloidal metallic or non-metallic particle, a dye particle, an enzyme or a substrate, an organic polymer, a latex particle, a liposome, or other vesicle containing a signal producing substance and the like. Illustrative labels of this type include large colloids, for example, metal colloids such as those from gold, selenium, silver, tin and titanium oxide. In some embodiments in which an enzyme is used as a direct visual label, biotinylated bases are incorporated into a target polynucleotide. Hybridization is detected by incubation with streptavidin-reporter molecules.

[0195] Suitable fluorochromes include, but are not limited to, fluorescein isothiocyanate (FITC), tetramethylrhodamine isothiocyanate (TRITC), R-Phycoerythrin (RPE), and Texas Red. Other exemplary fluorochromes include those discussed by Dower et al. (International Publication WO 93/06121). Reference also may be made to the fluorochromes described in U.S. Pat. Nos. 5,573,909 (Singer et al), 5,326,692 (Brinkley et al). Alternatively, reference may be made to the fluorochromes described in U.S. Pat. Nos. 5,227,487, 5,274,113, 5,405,975, 5,433,896, 5,442,045, 5,451,663, 5,453,517, 5,459,276, 5,516,864, 5,648,270 and 5,723,218. Commercially available fluorescent labels include, for example, fluorescein phosphoramidites such as Fluoreprime™ (Pharmacia), Fluoredite™ (Millipore) and FAM (Applied Biosystems International)

[0196] Radioactive reporter molecules include, for example, ³²P, which can be detected by an X-ray or phosphoimager techniques.

[0197] The hybrid-forming step can be performed under suitable conditions for hybridizing oligonucleotide probes to test nucleic acid including DNA or RNA. In this regard, reference may be made, for example, to NUCLEIC ACID HYBRIDIZATION, A PRACTICAL APPROACH (Homes and Higgins, eds.) (IRL press, Washington D.C., 1985). In general, whether hybridization takes place is influenced by the length of the oligonucleotide probe and the polynucleotide sequence under test, the pH, the temperature, the concentration of mono- and divalent cations, the proportion of G and C nucleotides in the hybrid-forming region, the viscosity of the medium and the possible presence of denaturants. Such variables also influence the time required for hybridization. The preferred conditions will therefore depend upon the particular application. Such empirical conditions, however, can be routinely determined without undue experimentation.

[0198] In certain advantageous embodiments, high discrimination hybridization conditions are used. For example, reference may be made to Wallace et al. (1979, Nucl. Acids Res. 6: 3543) who describe conditions that differentiate the hybridization of 11 to 17 base long oligonucleotide probes that match perfectly and are completely homologous to a target sequence as compared to similar oligonucleotide probes that contain a single internal base pair mismatch. Reference also may be made to Wood et al. (1985, Proc. Natl. Acid. Sci. USA 82: 1585) who describe conditions for hybridization of 11 to 20 base long oligonucleotides using 3M tetramethyl ammonium chloride wherein the melting point of the hybrid depends only on the length of the oligonucleotide probe, regardless of its GC content. In addition, Drmanac et al. (supra) describe hybridization conditions that allow stringent hybridization of 6-10 nucleotide long oligomers, and similar conditions may be obtained most readily by using nucleotide analogues such as ‘locked nucleic acids (Christensen et al., 2001, Biochem J 354: 481-4).

[0199] Generally, a hybridization reaction can be performed in the presence of a hybridization buffer that optionally includes a hybridization-optimizing agent, such as an isostabilising agent, a denaturing agent and/or a renaturation accelerant. Examples of isostabilising agents include, but are not restricted to, betaines and lower tetraalkyl ammonium salts. Denaturing agents are compositions that lower the melting temperature of double stranded nucleic acid molecules by interfering with hydrogen bonding between bases in a double stranded nucleic acid or the hydration of nucleic acid molecules. Denaturing agents include, but are not restricted to, formamide, formaldehyde, dimethylsulfoxide, tetraethyl acetate, urea, guanidium isothiocyanate, glycerol and chaotropic salts. Hybridization accelerants include heterogeneous nuclear ribonucleoprotein (hnRP) A1 and cationic detergents such as cetyltrimethylammonium bromide (CTAB) and dodecyl trimethylammonium bromide (DTAB), polylysine, spermine, spermidine, single stranded binding protein (SSB), phage T4 gene 32 protein and a mixture of ammonium acetate and ethanol. Hybridization buffers may include target polynucleotides at a concentration between about 0.005 nM and about 50 nM, preferably between about 0.5 nM and 5 nM, more preferably between about 1 nM and 2 nM.

[0200] A hybridization mixture containing the target IRC marker polynucleotides is placed in contact with the array of probes and incubated at a temperature and for a time appropriate to permit hybridization between the target sequences in the target polynucleotides and any complementary probes. Contact can take place in any suitable container, for example, a dish or a cell designed to hold the solid support on which the probes are bound. Generally, incubation will be at temperatures normally used for hybridization of nucleic acids, for example, between about 20° C. and about 75° C., example, about 25° C., about 30° C., about 35° C., about 40° C., about 45° C., about 50° C., about 55° C., about 60° C., or about 65° C. For probes longer than 14 nucleotides, 20° C. to 50° C. is desirable. For shorter probes, lower temperatures are preferred. A sample of target polynucleotides is incubated with the probes for a time sufficient to allow the desired level of hybridization between the target sequences in the target polynucleotides and any complementary probes. For example, the hybridization may be carried out at about 45° C.+/−10° C. in formamide for 1-2 days.

[0201] After the hybrid-forming step, the probes are washed to remove any unbound nucleic acid with a hybridization buffer, which can typically comprise a hybridization optimizing agent in the same range of concentrations as for the hybridization step. This washing step leaves only bound target polynucleotides. The probes are then examined to identify which probes have hybridized to a target polynucleotide.

[0202] The hybridization reactions are then detected to determine which of the probes has hybridized to a corresponding target sequence. Depending on the nature of the reporter molecule associated with a target polynucleotide, a signal may be instrumentally detected by irradiating a fluorescent label with light and detecting fluorescence in a fluorimeter; by providing for an enzyme system to produce a dye which could be detected using a spectrophotometer; or detection of a dye particle or a colored colloidal metallic or non metallic particle using a reflectometer; in the case of using a radioactive label or chemiluminescent molecule employing a radiation counter or autoradiography. Accordingly, a detection means may be adapted to detect or scan light associated with the label which light may include fluorescent, luminescent, focussed beam or laser light. In such a case, a charge couple device (CCD) or a photocell can be used to scan for emission of light from a probe:target polynucleotide hybrid from each location in the micro-array and record the data directly in a digital computer. In some cases, electronic detection of the signal may not be necessary. For example, with enzymatically generated color spots associated with nucleic acid array format, visual examination of the array will allow interpretation of the pattern on the array. In the case of a nucleic acid array, the detection means is suitably interfaced with pattern recognition software to convert the pattern of signals from the array into a plain language genetic profile. In certain embodiments, oligonucleotide probes specific for different IRC marker polynucleotides are in the form of a nucleic acid array and detection of a signal generated from a reporter molecule on the array is performed using a ‘chip reader’. A detection system that can be used by a ‘chip reader’ is described for example by Pirrung et al (U.S. Pat. No. 5,143,854). The chip reader will typically also incorporate some signal processing to determine whether the signal at a particular array position or feature is a true positive or maybe a spurious signal. Exemplary chip readers are described for example by Fodor et al (U.S. Pat. No., 5,925,525). Alternatively, when the array is made using a mixture of individually addressable kinds of labeled microbeads, the reaction may be detected using flow cytometry.

[0203] 7.2 Protein-Based Diagnostics

[0204] Consistent with the present invention, a difference in concentration of a IRC marker protein between a test subject or sample and a control subject or reference sample is indicative of the presence or absence of sepsis or inSIRS or distinguishes between sepsis and inSIRS. IRC marker protein levels in biological samples can be assayed using any suitable method known in the art. For example, when a IRC marker protein is an enzyme, the protein can be quantified based upon its catalytic activity or based upon the number of molecules of the protein contained in a sample. Antibody-based techniques may be employed, such as, for example, immunohistological and immunohistochemical methods for measuring the level of a protein of interest in a tissue sample. For example, specific recognition is provided by a primary antibody (polyclonal or monoclonal) and a secondary detection system is used to detect presence (or binding) of the primary antibody. Detectable labels can be conjugated to the secondary antibody, such as a fluorescent label, a radiolabel, or an enzyme (e.g., alkaline phosphatase, horseradish peroxidase) which produces a quantifiable, e.g., colored, product. In another suitable method, the primary antibody itself can be detectably labeled. As a result, immunohistological labeling of a tissue section is provided. In some embodiments, a protein extract is produced from a biological sample (e.g., tissue, cells) for analysis. Such an extract (e.g., a detergent extract) can be subjected to western-blot or dot/slot assay of the level of the protein of interest, using routine immunoblotting methods (Jalkanen et al., 1985, J. Cell. Biol. 101: 976-985; Jalkanen et al., 1987, J. Cell. Biol. 105: 3087-3096).

[0205] Other useful antibody-based methods include immunoassays, such as the enzyme-linked immunosorbent assay (ELISA) and the radioimmunoassay (MA). For example, a protein-specific monoclonal antibody, can be used both as an immunoadsorbent and as an enzyme-labeled probe to detect and quantify a IRC marker protein of interest. The amount of such protein present in a sample can be calculated by reference to the amount present in a standard preparation using a linear regression computer algorithm (see Lacobilli et al., 1988, Breast Cancer Research and Treatment 11: 19-30). In other embodiments, two different monoclonal antibodies to the protein of interest can be employed, one as the immunoadsorbent and the other as an enzyme-labeled probe.

[0206] Additionally, recent developments in the field of protein capture arrays permit the simultaneous detection and/or quantification of a large number of proteins. For example, low-density protein arrays on filter membranes, such as the universal protein array system (Ge, 2000 Nucleic Acids Res. 28(2):e3) allow imaging of arrayed antigens using standard ELISA techniques and a scanning charge-coupled device (CCD) detector. Immuno-sensor arrays have also been developed that enable the simultaneous detection of clinical analytes. It is now possible using protein arrays, to profile protein expression in bodily fluids, such as in sera of healthy or diseased subjects, as well as in subjects pre- and post-drug treatment.

[0207] Protein capture arrays typically comprise a plurality of protein-capture agents each of which defines a spatially distinct feature of the array. The protein-capture agent can be any molecule or complex of molecules which has the ability to bind a protein and immobilize it to the site of the protein-capture agent on the array. The protein-capture agent may be a protein whose natural function in a cell is to specifically bind another protein, such as an antibody or a receptor. Alternatively, the protein-capture agent may instead be a partially or wholly synthetic or recombinant protein which specifically binds a protein. Alternatively, the protein-capture agent may be a protein which has been selected in vitro from a mutagenized, randomized, or completely random and synthetic library by its binding affinity to a specific protein or peptide target. The selection method used may optionally have been a display method such as ribosome display or phage display, as known in the art. Alternatively, the protein-capture agent obtained via in vitro selection may be a DNA or RNA aptamer which specifically binds a protein target (see, e.g., Potyrailo et al., 1998 Anal. Chem. 70:3419-3425; Cohen et al., 1998, Proc. Natl. Acad. Sci. USA 95:14272-14277; Fukuda, et al., 1997 Nucleic Acids Symp. Ser. 37:237-238; available from SomaLogic). For example, aptamers are selected from libraries of oligonucleotides by the Selex™ process and their interaction with protein can be enhanced by covalent attachment, through incorporation of brominated deoxyuridine and UV-activated crosslinking (photoaptamers). Aptamers have the advantages of ease of production by automated oligonucleotide synthesis and the stability and robustness of DNA; universal fluorescent protein stains can be used to detect binding. Alternatively, the in vitro selected protein-capture agent may be a polypeptide (e.g., an antigen) (see, e.g., Roberts and Szostak, 1997 Proc. Natl. Acad. Sci. USA 94:12297-12302).

[0208] An alternative to an array of capture molecules is one made through ‘molecular imprinting’ technology, in which peptides (e.g., from the C-terminal regions of proteins) are used as templates to generate structurally complementary, sequence-specific cavities in a polymerizable matrix; the cavities can then specifically capture (denatured) proteins which have the appropriate primary amino acid sequence (e.g., available from ProteinPrint™ and Aspira Biosystems).

[0209] Exemplary protein capture arrays include arrays comprising spatially addressed antigen-binding molecules, commonly referred to as antibody arrays, which can facilitate extensive parallel analysis of numerous proteins defining a proteome or subproteome. Antibody arrays have been shown to have the required properties of specificity and acceptable background, and some are available commercially (e.g., BD Biosciences, Clontech, BioRad and Sigma). Various methods for the preparation of antibody arrays have been reported (see, e.g., Lopez et al., 2003 J. Chromatogr. B 787:19-27; Cahill, 2000 Trends in Biotechnology 7:47-51; U.S. Pat. App. Pub. 2002/0055186; U.S. Pat. App. Pub. 2003/0003599; PCT publication WO 03/062444; PCT publication WO 03/077851; PCT publication WO 02/59601; PCT publication WO 02/39120; PCT publication WO 01/79849; PCT publication WO 99/39210). The antigen-binding molecules of such arrays may recognise at least a subset of proteins expressed by a cell or population of cells, illustrative examples of which include growth factor receptors, hormone receptors, neurotransmitter receptors, catecholamine receptors, amino acid derivative receptors, cytokine receptors, extracellular matrix receptors, antibodies, lectins, cytokines, serpins, proteases, kinases, phosphatases, ras-like GTPases, hydrolases, steroid hormone receptors, transcription factors, heat-shock transcription factors, DNA-binding proteins, zinc-finger proteins, leucine-zipper proteins, homeodomain proteins, intracellular signal transduction modulators and effectors, apoptosis-related factors, DNA synthesis factors, DNA repair factors, DNA recombination factors, cell-surface antigens, hepatitis C virus (HCV) proteases and HIV proteases.

[0210] Antigen-binding molecules for antibody arrays are made either by conventional immunization (e.g., polyclonal sera and hybridomas), or as recombinant fragments, usually expressed in E. coli, after selection from phage display or ribosome display libraries (e.g., available from Cambridge Antibody Technology, Bioinvent, Affitech and Biosite). Alternatively, ‘combibodies’ comprising non-covalent associations of VH and VL domains, can be produced in a matrix format created from combinations of diabody-producing bacterial clones (e.g., available from Domantis). Exemplary antigen-binding molecules for use as protein-capture agents include monoclonal antibodies, polyclonal antibodies, Fv, Fab, Fab′ and F(ab′)₂ immunoglobulin fragments, synthetic stabilized Fv fragments, e.g., single chain Fv fragments (scFv), disulfide stabilized Fv fragments (dsFv), single variable region domains (dAbs) minibodies, combibodies and multivalent antibodies such as diabodies and multi-scFv, single domains from camelids or engineered human equivalents.

[0211] Individual spatially distinct protein-capture agents are typically attached to a support surface, which is generally planar or contoured. Common physical supports include glass slides, silicon, microwells, nitrocellulose or PVDF membranes, and magnetic and other microbeads.

[0212] While microdrops of protein delivered onto planar surfaces are widely used, related alternative architectures include CD centrifugation devices based on developments in microfluidics (e.g., available from Gyros) and specialized chip designs, such as engineered microchannels in a plate (e.g., The Living Chip™, available from Biotrove) and tiny 3D posts on a silicon surface (e.g., available from Zyomyx).

[0213] Particles in suspension can also be used as the basis of arrays, providing they are coded for identification; systems include color coding for microbeads (e.g., available from Luminex, Bio-Rad and Nanomics Biosystems) and semiconductor nanocrystals (e.g., QDots™, available from Quantum Dots), and barcoding for beads (UltraPlex™, available from Smartbeads) and multimetal microrods (Nanobarcodes™ particles, available from Surromed). Beads can also be assembled into planar arrays on semiconductor chips (e.g., available from LEAPS technology and BioArray Solutions). Where particles are used, individual protein-capture agents are typically attached to an individual particle to provide the spatial definition or separation of the array. The particles may then be assayed separately, but in parallel, in a compartmentalized way, for example in the wells of a microtiter plate or in separate test tubes.

[0214] In operation, a protein sample, which is optionally fragmented to form peptide fragments (see, e.g., U.S. Pat. App. Pub. 2002/0055186), is delivered to a protein-capture array under conditions suitable for protein or peptide binding, and the array is washed to remove unbound or non-specifically bound components of the sample from the array. Next, the presence or amount of protein or peptide bound to each feature of the array is detected using a suitable detection system. The amount of protein bound to a feature of the array may be determined relative to the amount of a second protein bound to a second feature of the array. In certain embodiments, the amount of the second protein in the sample is already known or known to be invariant.

[0215] For analyzing differential expression of proteins between two cells or cell populations, a protein sample of a first cell or population of cells is delivered to the array under conditions suitable for protein binding. In an analogous manner, a protein sample of a second cell or population of cells to a second array, is delivered to a second array which is identical to the first array. Both arrays are then washed to remove unbound or non-specifically bound components of the sample from the arrays. In a final step, the amounts of protein remaining bound to the features of the first array are compared to the amounts of protein remaining bound to the corresponding features of the second array. To determine the differential protein expression pattern of the two cells or populations of cells, the amount of protein bound to individual features of the first array is subtracted from the amount of protein bound to the corresponding features of the second array.

[0216] In an illustrative example, fluorescence labeling can be used for detecting protein bound to the array. The same instrumentation as used for reading DNA microarrays is applicable to protein-capture arrays. For differential display, capture arrays (e.g. antibody arrays) can be probed with fluorescently labeled proteins from two different cell states, in which cell lysates are labeled with different fluorophores (e.g., Cy-3 and Cy-5) and mixed, such that the color acts as a readout for changes in target abundance. Fluorescent readout sensitivity can be amplified 10-100 fold by tyramide signal amplification (TSA) (e.g., available from PerkinElmer Lifesciences). Planar waveguide technology (e.g., available from Zeptosens) enables ultrasensitive fluorescence detection, with the additional advantage of no washing procedures. High sensitivity can also be achieved with suspension beads and particles, using phycoerythrin as label (e.g., available from Luminex) or the properties of semiconductor nanocrystals (e.g., available from Quantum Dot). Fluorescence resonance energy transfer has been adapted to detect binding of unlabelled ligands, which may be useful on arrays (e.g., available from Affibody). Several alternative readouts have been developed, including adaptations of surface plasmon resonance (e.g., available from HTS Biosystems and Intrinsic Bioprobes), rolling circle DNA amplification (e.g., available from Molecular Staging), mass spectrometry (e.g., available from Sense Proteomic, Ciphergen, Intrinsic and Bioprobes), resonance light scattering (e.g., available from Genicon Sciences) and atomic force microscopy (e.g., available from BioForce Laboratories). A microfluidics system for automated sample incubation with arrays on glass slides and washing has been co-developed by NextGen and Perkin Elmer Life Sciences.

[0217] In certain embodiments, the techniques used for detection of IRC marker expression products will include internal or external standards to permit quantitative or semi-quantitative determination of those products, to thereby enable a valid comparison of the level or functional activity of these expression products in a biological sample with the corresponding expression products in a reference sample or samples. Such standards can be determined by the skilled practitioner using standard protocols. In specific examples, absolute values for the level or functional activity of individual expression products are determined.

[0218] In specific embodiments, the diagnostic methods are implemented using a system as disclosed, for example, in International Publication No. WO 02/090579 and in copending PCT Application No. PCT/AU03/01517 filed Nov. 14, 2003, comprising at least one end station coupled to a base station. The base station is typically coupled to one or more databases comprising predetermined data from a number of individuals representing the level or functional activity of IRC marker expression products, together with indications of the actual status of the individuals (e.g., presence, absence of sepsis or inSIRS or post-surgical inflammation) when the predetermined data was collected. In operation, the base station is adapted to receive from the endstation, typically via a communications network, subject data representing a measured or normalized level or functional activity of at least one expression product in a biological sample obtained from a test subject and to compare the subject data to the predetermined data stored in the database(s). Comparing the subject and predetermined data allows the base station to determine the status of the subject in accordance with the results of the comparison. Thus, the base station attempts to identify individuals having similar parameter values to the test subject and once the status has been determined on the basis of that identification, the base station provides an indication of the diagnosis to the end station.

[0219] 7.3 Kits

[0220] All the essential materials and reagents required for detecting and quantifying IRC marker expression products may be assembled together in a kit. The kits may also optionally include appropriate reagents for detection of labels, positive and negative controls, washing solutions, blotting membranes, microtiter plates dilution buffers and the like. For example, a nucleic acid-based detection kit may include (i) an IRC marker polynucleotide (which may be used as a positive control), (ii) a primer or probe that specifically hybridizes to an IRC marker polynucleotide. Also included may be enzymes suitable for amplifying nucleic acids including various polymerases (Reverse Transcriptase, Taq, Sequenase™ DNA ligase etc. depending on the nucleic acid amplification technique employed), deoxynucleotides and buffers to provide the necessary reaction mixture for amplification. Such kits also generally will comprise, in suitable means, distinct containers for each individual reagent and enzyme as well as for each primer or probe. Alternatively, a protein-based detection kit may include (i) an IRC marker polypeptide (which may be used as a positive control), (ii) an antigen-binding molecule that is immuno-interactive with an IRC marker polypeptide. The kit can also feature various devices and reagents for performing one of the assays described herein; and/or printed instructions for using the kit to quantify the expression of an sepsis marker gene.

### 8. Methods of Treatment or Prophylaxis

[0221] The present invention also extends to the management of post-surgical inflammation, inSIRS and sepsis, or prevention of further progression of post-surgical inflammation, inSIRS and sepsis, or assessment of the efficacy of therapies in subjects following positive diagnosis for the presence of post-surgical inflammation, inSIRS or sepsis in a subject. Post-surgical inflammation is typically managed using intravenous fluids, anti-inflammatories, antibiotics or immunotherapy. However, the management of sepsis or inSIRS conditions is generally highly intensive and can include identification and amelioration of the underlying cause and aggressive use of therapeutic compounds such as, vasoactive compounds, antibiotics, steroids, antibodies to endotoxin, anti tumour necrosis factor agents, recombinant protein C. In addition, palliative therapies as described for example in Cohen and Glauser (1991, Lancet 338: 736-739) aimed at restoring and protecting organ function can be used such as intravenous fluids and oxygen and tight glycemic control. Therapies for sepsis are reviewed in Healy (2002, Ann. Pharmacother. 36(4): 648-54) and Brindley (2005, CJEM. 7(4): 227) and Jenkins (2006, J Hosp Med. 1(5): 285-295).

[0222] Typically, the therapeutic agents will be administered in pharmaceutical (or veterinary) compositions together with a pharmaceutically acceptable carrier and in an effective amount to achieve their intended purpose. The dose of active compounds administered to a subject should be sufficient to achieve a beneficial response in the subject over time such as a reduction in, or relief from, the symptoms of post-surgical inflammation, sepsis or inSIRS. The quantity of the pharmaceutically active compounds(s) to be administered may depend on the subject to be treated inclusive of the age, sex, weight and general health condition thereof. In this regard, precise amounts of the active compound(s) for administration will depend on the judgment of the practitioner. In determining the effective amount of the active compound(s) to be administered in the treatment or prevention of post-surgical inflammation, sepsis or inSIRS, the medical practitioner or veterinarian may evaluate severity of any symptom associated with the presence of post-surgical inflammation, sepsis or inSIRS including, inflammation, blood pressure anomaly, tachycardia, tachypnea fever, chills, vomiting, diarrhoea, skin rash, headaches, confusion, muscle aches, seizures. In any event, those of skill in the art may readily determine suitable dosages of the therapeutic agents and suitable treatment regimens without undue experimentation.

[0223] The therapeutic agents may be administered in concert with adjunctive (palliative) therapies to increase oxygen supply to major organs, increase blood flow to major organs and/or to reduce the inflammatory response. Illustrative examples of such adjunctive therapies include non steroidal-anti inflammatory drugs (NSAIDs), intravenous saline and oxygen.

[0224] In order that the invention may be readily understood and put into practical effect, particular preferred embodiments will now be described by way of the following non-limiting examples.

### EXAMPLES

### Example 1

### Identification of Diagnostic Genes that Distinguish Between Post-Surgical Inflammation, Sepsis and inSIRS

### Experimental Disease Trial Designs

[0225] Clinical trials were performed to determine whether transcripts of genes could distinguish between patients with sepsis, inSIRS and post-surgical inflammation.

[0226] Blood samples were collected at various time points to provide time course data and gene expression was analysed using an Affymetrix exon array (Affymetrix HuEx-1.0) Analysis of these data (see “Identification of Diagnostic Marker Genes” below) revealed 235 specific genes that show evidence of splice variation that also differ in expression between sepsis-positive patients, inSIRS-positive patients and post-surgical patients. Of these 235 only a limited number (57) were identified that can be used as classifiers to distinguish between these patient groups. The 57 genes produce 258 transcripts that are differentially expressed between post-surgical inflammation and inSIRS, post-surgical inflammation and sepsis and sepsis and inSIRS. It is possible to design a nucleic acid assay that measures the RNA level in the sample corresponding to at least one and desirably at least 2, 3, 4, 5, 6, 7, 8, 9, 10, 11, 12, 13, 14, 15, 16, 17, 18, 19, 20, 21, 22, 23, 24, 25, 26, 27, 28, 29, 30, 31, 32, 33, 34, 35, 36, 37, 38 39, 40, 41, 42, 43, 44, 45, 46, 47, 48, 49, 50, 51, 52, 53, 64, 55, 56, 57 IRC marker transcripts, representative transcript sequences of which are set forth in SEQ ID NO: 1, 3, 5, 7, 9, 11, 13, 15, 17, 19, 21, 23, 25, 27, 29, 31, 33, 35, 37, 39, 41, 43, 45, 47, 49, 51, 53, 55, 57, 59, 61, 63, 65, 67, 69, 71, 73, 75, 77, 79, 81, 83, 85, 87, 89, 91, 93, 95, 97, 99, 101, 103, 105, 107, 109, 111, 113, 115, 117, 119, 121, 123, 125, 127, 129, 131, 133, 135, 137, 139, 141, 143, 145, 147, 149, 151, 153, 155, 157, 159, 161, 163, 165, 167, 169, 171, 173, 175, 177, 179, 181, 183, 185, 187, 189, 191, 193, 195, 197, 199, 201, 203, 205, 207, 209, 211, 213, 215, 217, 219, 221, 223, 225, 227, 229, 231, 233, 235, 237, 239, 241, 243, 245, 247, 249, 251, 253, 255, 257, 259, 261, 263, 265, 267, 269, 271, 273, 275, 277, 279, 281, 283, 285, 287, 289, 291, 293, 295, 297, 299, 301, 303, 305, 307, 309, 311, 313, 315, 317, 319, 321, 323, 325, 327, 329, 331, 333, 335, 337, 339, 341, 343, 345, 347, 349, 351, 353, 355, 357, 359, 361, 363, 365, 367, 369, 371, 373, 375, 377, 379, 381, 383, 385, 387, 389, 391, 393, 395, 397, 399, 401, 403, 405, 407, 409, 411, 413, 415, 417, 419, 421, 423, 425, 427, 429, 431, 433, 435, 437, 439, 441, 443, 445, 447, 449, 451, 453, 455, 457, 459, 461, 463, 465, 467, 469, 471, 473, 475, 477, 479, 481, 483, 485, 487, 489, 491, 493, 495, 497, 499, 501, 503, 505, 507, 509, 511, 513 or 515. Alternatively, or in addition, it is possible to design an assay that measures the protein level in the sample corresponding to at least one and desirably at least 2, 3, 4, 5, 6, 7, 8, 9, 10, 11, 12, 13, 14, 15, 16, 17, 18, 19, 20, 21, 22, 23, 24, 25, 26, 27, 28, 29, 30, 31, 32, 33, 34, 35, 36, 37, 38 39, 40, 41, 42, 43, 44, 45, 46, 47, 48, 49, 50, 51, 52, 53, 64, 55, 56, 57 IRC marker polypeptides, representative amino acid sequences of which are set forth in SEQ ID NO: 2, 4, 6, 8, 10, 12, 14, 16, 18, 20, 22, 24, 26, 28, 30, 32, 34, 36, 38, 40, 42, 44, 46, 48, 50, 52, 54, 56, 58, 60, 62, 64, 66, 68, 70, 72, 74, 76, 78, 80, 82, 84, 86, 88, 90, 92, 94, 96, 98, 100, 102, 104, 106, 108, 110, 112, 114, 116, 118, 120, 122, 124, 126, 128, 130, 132, 134, 136, 138, 140, 142, 144, 146, 148, 150, 152, 154, 156, 158, 160, 162, 164, 166, 168, 170, 172, 174, 176, 178, 180, 182, 184, 186, 188, 190, 192, 194, 196, 198, 200, 202, 204, 206, 208, 210, 212, 214, 216, 218, 220, 222, 224, 226, 228, 230, 232, 234, 236, 238, 240, 242, 244, 246, 248, 250, 252, 254, 256, 258, 260, 262, 264, 266, 268, 270, 272, 274, 276, 278, 280, 282, 284, 286, 288, 290, 292, 294, 296, 298, 300, 302, 304, 306, 308, 310, 312, 314, 316, 318, 320, 322, 324, 326, 328, 330, 332, 334, 336, 338, 340, 342, 344, 346, 348, 350, 352, 354, 356, 358, 360, 362, 364, 366, 368, 370, 372, 374, 376, 378, 380, 382, 384, 386, 388, 390, 392, 394, 396, 398, 400, 402, 404, 406, 408, 410, 412, 414, 416, 418, 420, 422, 424, 426, 428, 430, 432, 434, 436, 438, 440, 442, 444, 446, 448, 450, 452, 454, 456, 458, 460, 462, 464, 466, 468, 470, 472, 474, 476, 478, 480, 482, 484, 486, 488, 490, 492, 494, 496, 498, 500, 502, 504, 506, 508, 510, 512, 514 or 516.

### Materials and Methods

### Study Design

[0227] In Phase I of a sepsis clinical research program, the trial was conducted at a single tertiary referral centre. Intensive care sepsis patients, as well as healthy controls were prospectively enrolled and attended a single visit where 5 mL of blood was collected for gene expression analysis using an Affymetrix exon array.

[0228] A definitive diagnosis of sepsis was unlikely to be known at the time patients were enrolled in the Phase II study, and thus confirmation of sepsis diagnosis and the assignment of patients to the sepsis cohorts was made retrospectively. Data collected from participants not diagnosed with inSIRS or sepsis were only assessed for frequency of adverse events.

[0229] Clinical data collection and blood specimens were not collected until after surgery during their post-operative admission to the ICU. Patients who had clinical signs and/or symptoms of sepsis or inSIRS were consented and enrolled into the study as soon as possible after they have been identified, in most cases within 24 hours of admission. Final assessment of whether the participant had inSIRS or sepsis or post-surgical inflammation was made retrospectively as clinical information became available.

### Study Population

[0230] In the Phase I clinical trial, 12 patients presenting with clinical signs and symptoms of sepsis (SIRS criteria as well as suspected infection) from the ICU were enrolled. A further 10 male and 10 female control participants from within were also enrolled. Study participants were all over 18 years and either they or their surrogate decision maker signed and dated the clinical trial information sheet and consent form. All of the control participants were considered to be in good health based on an abbreviated physical examination by the Principal Investigator, and known medical history at the time of clinical trial enrolment.

[0231] Phase II of this clinical research program comprised of two cohorts of patients and included a cohort of 36 inSIRS patients with clinical signs and symptoms consistent with inSIRS, and a cohort of 17 patients with the clinical signs and symptoms consistent with sepsis.

[0232] Patients or their surrogate decision maker were offered the opportunity to participate in this study if the patient presented with signs and symptoms of either inSIRS or sepsis at the time of admission to ICU. All inSIRS and sepsis participants displayed clinical signs of fever, hypotension, leukocytosis or leucopoenia and decreased peripheral vascular resistance. These criteria are based on the American College of Physicians and the Society of Critical Care Medicine standard definition of sepsis. That is, inSIRS and sepsis participants needed a variable combination of clinical conditions including two or more of the following within the last 24 hours: temperature >38° C. or <36° C.; heart rate >90 beats/min; respiratory rate >20 breathes/min or a PaCO₂ of <4.3 kPa (<32 mm Hg); and evidence of a white blood cell count <4,000 cells/mm³ (<4×10⁹ cells/L) or >12,000 cells/mm³ (>12×10⁹ cells/L) or >10% immature neutrophils (band forms). Participants were excluded if they had any chronic systemic immune-inflammatory disorders including SLE, Crohn's disease, IDDM; were transplant recipients or were currently receiving chemotherapy treatment for cancer. Most patients had other underlying co-morbidities. Patients who were admitted for planned major open surgery were approached and consented prior to the surgical procedure, and their study blood samples drawn after surgery during their post-operative admission to the ICU. All study participants were 18 years of age or older and had a body mass index of less than 40.

### Collection of Data

[0233] Demography, vital signs measurements (blood pressure, heart rate, respiratory rate, oxygen saturation, temperature), hematology (full blood count), clinical chemistry. (urea, electrolytes, liver function enzymes, blood glucose) as well as microbial status was recorded. Blood was drawn into maximally 6 PAXgene tubes for gene expression analysis using RT-PCR.

### Blood Collection

[0234] Blood is collected for the purpose of extraction of high quality RNA or protein. Suitable blood collection tubes for the collection, preservation, transport and isolation of RNA include PAXgene™ tubes (PreAnalytix Inc., Valencia, Calif., USA). Alternatively, blood can be collected into tubes containing solutions designed for the preservation of nucleic acids (available from Roche, Ambion, Invitrogen and ABI). For the determination of protein levels, 50 mL of blood is prevented from clotting by collection into a tube containing 4 mL of 4% sodium citrate. White blood cells and plasma are isolated and stored frozen for later analysis and detection of specific proteins. PAXgene tubes can be kept at room temperature prior to RNA extraction. Clinical signs are recorded in a standard format.

### Total RNA Extraction

[0235] A kit available from Qiagen Inc (Valencia, Calif., USA) has the reagents and instructions for the isolation of total RNA from 2.5 mL blood collected in the PAXgene Blood RNA Tube. Isolation begins with a centrifugation step to pellet nucleic acids in the PAXgene blood RNA tube. The pellet is washed and resuspended and incubated in optimized buffers together with Proteinase K to bring about protein digestion. An additional centrifugation is carried out to remove residual cell debris and the supernatant is transferred to a fresh microcentrifuge tube. Ethanol is added to adjust binding conditions, and the lysate is applied to the PAXgene RNA spin column. During brief centrifugation, RNA is selectively bound to the silica-gel membrane as contaminants pass through. Remaining contaminants are removed in three efficient wash steps and RNA is then eluted in Buffer BR5.

[0236] Determination of RNA quantity and quality is necessary prior to proceeding and can be achieved using an Agilent Bioanalyzer and Absorbance 260/280 ratio using a spectrophotometer.

### Choice of Method

[0237] Measurement of specific RNA levels in a tissue sample can be achieved using a variety of technologies. Two common and readily available technologies that are well known in the art are:
[0238] GeneChip® analysis using Affymetrix technology.
[0239] Real-Time Polymerase Chain Reaction (TaqMan™ from Applied Biosystems for example).

[0240] GeneChips® quantitate RNA by detection of labeled cRNA hybridized to short oligonucleotides built on a silicon substrate. Details on the technology and methodology can be found at www.affymetrix.com.

[0241] Real-Time Polymerase Chain Reaction (RT-PCR) quantitates RNA using two PCR primers, a labeled probe and a thermostable DNA polymerase. As PCR product is generated a dye is released into solution and detected. Internal controls such as 18S RNA probes are often used to determine starting levels of total RNA in the sample. Each gene and the internal control are run separately. Details on the technology and methods can be found at www.appliedbiosytems.com or www.qiagen.com or www.biorad.com. Applied Biosystems offer a service whereby the customer provides DNA sequence information and payment and is supplied in return all of the reagents required to perform RT-PCR analysis on individual genes.

[0242] GeneChip® analysis has the advantage of being able to analyze thousands of genes at a time. However it is expensive and takes over 3 days to perform a single assay. RT-PCR generally only analyses one gene at a time, but is inexpensive and can be completed within a single day.

[0243] RT-PCR is the method, of choice for gene expression analysis if the number of specific genes to be analyzed is less than 20. GeneChip® or other gene expression analysis technologies (such as Illumina Bead Arrays) are the method of choice when many genes need to be analyzed simultaneously.

[0244] The methodology for GeneChip® data generation and analysis and Real Time PCR is presented below in brief.

### GeneChip® Data Generation

### cDNA & cRNA Generation

[0245] The following method for cDNA and cRNA generation from total RNA has been adapted from the protocol provided and recommended by Affymetrix (www.affymetrix.com).

[0246] The steps are:
[0247] A total of 3 μg of total RNA is used as a template to generate double stranded cDNA.
[0248] cRNA is generated and labeled using biotinylated Uracil (dUTP).
[0249] biotin-labeled cRNA is cleaned and the quantity determined using a spectrophotometer and MOPS gel analysis.
[0250] labeled cRNA is fragmented to ˜300 bp in size.
[0251] RNA quantity is determined on an Agilent “Lab-on-a-Chip” system (Agilent Technologies).

### Hybridization, Washing & Staining

[0252] The steps are:
[0253] A hybridization cocktail is prepared containing 0.05 μg/μL of labeled and fragmented cRNA, spike-in positive hybridization controls, and the Affymetrix oligonucleotides B2, bioB, bioC, bioD and cre.
[0254] The final volume (80 μL) of the hybridization cocktail is added to the GeneChip® cartridge.
[0255] The cartridge is placed in a hybridization oven at constant rotation for 16 hours.
[0256] The fluid is removed from the GeneChip® and stored.
[0257] The GeneChip® is placed in the fluidics station.
[0258] The experimental conditions for each GeneChip® are recorded as an .EXP file.
[0259] All washing and staining procedures are carried out by the Affymetrix fluidics station with an attendant providing the appropriate solutions.
[0260] The GeneChip® is washed, stained with steptavidin-phycoerythin dye and then washed again using low salt solutions.
[0261] After the wash protocols are completed, the dye on the probe array is ‘excited’ by laser and the image captured by a CCD camera using an Affymetrix Scanner (manufactured by Agilent).

### Scanning & Data File Generation

[0262] The scanner and MAS 5 software generates an image file from a single GeneChip® called a .DAT file.

[0263] The .DAT file is then pre-processed prior to any statistical analysis.

[0264] Data pre-processing steps (prior to any statistical analysis) include:
[0265] .DAT File Quality Control (QC).
[0266] .CEL File Generation.
[0267] Scaling and Normalization.

### .DAT File Quality Control

[0268] The .DAT file is an image. The image is inspected manually for artifacts (e.g. high/low intensity spots, scratches, high regional or overall background). (The B2 oligonucleotide hybridization performance is easily identified by an alternating pattern of intensities creating a border and array name.) The MAS 5 software used the B2 oligonucleotide border to align a grid over the image so that each square of oligonucleotides was centered and identified.

[0269] The other spiked hybridization controls (bioB, bioC, bioD and cre) are used to evaluate sample hybridization efficiency by reading “present” gene detection calls with increasing signal values, reflecting their relative concentrations. (If the .DAT file is of suitable quality it is converted to an intensity data file (.CEL file) by Affymetrix MAS 5 software).

### .CEL File Generation

[0270] The .CEL files generated by the MAS 5 software from .DAT files contain calculated raw intensities for the probe sets. Gene expression data is obtained by subtracting a calculated background from each cell value. To eliminate negative intensity values, a noise correction fraction based from a local noise value from the standard deviation of the lowest 2% of the background is applied.

[0271] All .CEL files generated from the GeneChips® are subjected to specific quality metrics parameters.

[0272] Some metrics are routinely recommended by Affymetrix and can be determined from Affymetrix internal controls provided as part of the GeneChip®. Other metrics are based on experience and the processing of many GeneChips®.

[0273] Analysis of GeneChip® Data

[0274] Two illustrative approaches to normalising data may be used:
[0275] Affymetrix MAS 5 Algorithm.
[0276] Robust Multi-chip Analysis (RMA) algorithm of Irizarry (Irizarray et al., 2002, Biostatistics (in print)).

[0277] Those of skill in the art will recognize that many other approaches might be adopted, without materially affecting the invention.

### Preprocessing

[0278] The arrays were preprocessed using the Affymetrix Power Tools (APT) apt-probeset-summarize program. The analysis used the array description files current at the time, (\HuEx-1 0-st-v2.r2.pgf″ and \HuEx-1 0-st-v2.r2.clf″), the antigenomic probes for background (\HuEx-1 0-st-v2.r2.antigenomic.bgp″) and the standard QC probes (\HuEx-1 0-st-v2.r2.qcc″). Additionally, in all the analyses, the Robust Multichip Average (RMA) approach was used.

[0279] Using various Affymetrix mapping files, it is possible to compute expression measures at either the Exon or Gene level, and for subsets of Exons or Genes entitled, Core, Extend or Full. To date in subsequent analysis the focus has been on the Core set of Exons and Genes as these are the most well understood and annotated subsets. There is an exon analysis package available for the R statistical software package (www.r-project.org) called exonmap. It is provided by the X:Map genome browser project (http://xmap.picr.man.ac.uk). Exonmap provides an alternative chip description \exon.pmcdf″ that can be used to produce exon level RMA normalised measures of expression for the Core set of exons. On comparison with the output of the APT utilities, the differences were found to be minor. Since the APT utilities also provide gene level measures, these version were used throughout.

### Quality Checking

[0280] The APT utility provides various quality control summaries including the use of boxplots of the mean expression levels for the positive and negative controls.

### Model for the Data

[0281] The data were analysed to identify differential features (exons or genes) using the linear model approach embodied in the limma package of R. limma proceeds by estimating the coefficients for each feature and computing a moderated t-statistic for each contrast of interest. In addition, an overall F-statistic is computed for the 3 contrasts together. The equivalent p-values can then be adjusted for multiple tests in various ways. In this case, Holm's method of adjustment and Benjamini & Hochberg's false discovery rate (FDR).

### Affymetrix MAS 5 Algorithm

[0282] .CEL files are used by Affymetrix MAS 5 software to normalize or scale the data. Scaled data from one chip are compared to similarly scaled data from other chips.

[0283] Affymetrix MAS 5 normalization is achieved by applying the default “Global Scaling” option of the MAS 5 algorithm to the .CEL files. This procedure subtracts a robust estimate of the center of the distribution of probe values, and divides by a robust estimate of the probe variability. This produces a set of chips with common location and scale at the probe level.

[0284] Gene expression indices are generated by a robust averaging procedure on all the probe pairs for a given gene. The results are constrained to be non-negative.

[0285] Given that scaling takes place at the level of the probe, rather than at the level of the gene, it is possible that even after normalization there may be chip-to-chip differences in overall gene expression level. Following standard MAS5 normalization, values for each gene were de-trended with respect to median chip intensity. That is, values for each gene were regressed on the median chip intensity, and residuals were calculated. These residuals were taken as the de-trended estimates of expression for each gene

[0286] Median chip intensity was calculated using the Affymetrix MAS5 algorithm, but with a scale factor fixed at one.

### RMA Algorithm

[0287] This algorithm quantifies the expression of a set of chips, rather than of a single chip. It estimates background intensities using a robust statistical model applied to perfect match probe data. It does not make use of mis-match probe data. Following implicit background correction, chips are processed using Quantile Quantile normalization (Rizarray et al., 2002, Biostatistics (in print)).

### DNA Extraction

[0288] A kit available from Qiagen Inc (Valencia, Calif., USA) has the reagents and instructions for the isolation of total DNA from 8.5 mL blood collected in the PAXgene Blood DNA Tube. Isolation begins with the addition of additional lysis solution followed by a centrifugation step. The pellet is washed and resuspended and incubated in optimized buffers together with Proteinase K to bring about protein digestion. DNA is precipitated using alcohol and an additional centrifugation is carried out to pellet the nucleic acid. Remaining contaminants are removed in a wash step and the DNA is then resuspended in Buffer BG4.

[0289] Determination of DNA quantity and quality is necessary prior to proceeding and can be achieved using a spectrophotometer or agarose gel electrophoresis.

### Genotyping Analysis

[0290] Many methods are available to genotype DNA. A review of allelic discrimination methods can be found in Kristensen et al. (Biotechniques 30(2): 318-322 (2001). An illustrative method for genotyping using allele-specific PCR is described here.

### Primer Design

[0291] Upstream and downstream PCR primers specific for particular alleles can be designed using freely available computer programs, such as Primer3 (http://frodo.wi.mit.edu/primer3/primer3_code.html). Alternatively the DNA sequences of the various alleles can be aligned using a program such as ClustalW (http://www.ebi.ac.uk/clustalw/) and specific primers designed to areas where DNA sequence differences exist but retaining enough specificity to ensure amplification of the correct amplicon. Preferably a PCR amplicon is designed to have a restriction enzyme site in one allele but not the other. Primers are generally 18-25 base pairs in length with similar melting temperatures.

### PCR Amplification

[0292] The composition of PCR reactions has been described elsewhere (Clinical Applications of PCR, Dennis Lo (Editor), Blackwell Publishing, 1998). Briefly, a reaction contains primers, DNA, buffers and a thermostable polymerase enzyme. The reaction is cycled (up to 50 times) through temperature steps of denaturation, hybridization and DNA extension on a thermocycler such as the MJ Research Thermocycler model PTC-96V.

### DNA Analysis

[0293] PCR products can be analyzed using a variety of methods including size differentiation using mass spectrometry, capillary gel electrophoresis and agarose gel electrophoresis. If the PCR amplicons have been designed to contain differential restriction enzyme sites, the DNA in the PCR reaction is purified using DNA-binding columns or precipitation and re-suspended in water, and then restricted using the appropriate restriction enzyme. The restricted DNA can then be run on an agarose gel where DNA is separated by size using electric current. Various alleles of a gene will have different sizes depending on whether they contain restriction sites. Thus, homozygotes and heterozygotes can be determined.

### Real-Time PCR Data Generation

[0294] Background information for conducting Real-time PCR may be obtained, for example, at http://dorakmt.tripod.com/genetics/realtime.html and in a review by Bustin SA (2000, J Mol Endocrinol 25:169-193).

### TaqMan™ Primer and Probe Design Guidelines

[0295] 1. The Primer Express™ (ABI) software designs primers with a melting temperature (Tm) of 58-60° C., and probes with a Tm value of 10° C. higher. The Tm of both primers should be equal.

[0296] 2. Primers should be 15-30 bases in length.

[0297] 3. The G+C content should ideally be 30-80%. If a higher G+C content is unavoidable, the use of high annealing and melting temperatures, cosolvents such as glycerol, DMSO, or 7-deaza-dGTP may be necessary:

[0298] 4. The run of an identical nucleotide should be avoided. This is especially true for G, where runs of four or more Gs is not allowed.

[0299] 5. The total number of Gs and Cs in the last five nucleotides at the 3′ end of the primer should not exceed two (the newer version of the software has an option to do this automatically). This helps to introduce relative instability to the 3′ end of primers to reduce non-specific priming. The primer conditions are the same for SYBR Green assays.

[0300] 6. Maximum amplicon size should not exceed 400 by (ideally 50-150 bases). Smaller amplicons give more consistent results because PCR is more efficient and more tolerant of reaction conditions (the short length requirement has nothing to do with the efficiency of 5′ nuclease activity).

[0301] 7. The probes should not have runs of identical nucleotides (especially four or more consecutive Gs), G+C content should be 30-80%, there should be more Cs than Gs, and not a G at the 5′ end. The higher number of Cs produces a higher αRn. The choice of probe should be made first.

[0302] 8. To avoid false-positive results due to amplification of contaminating genomic DNA in the cDNA preparation, it is preferable to have primers spanning exon-exon junctions. This way, genomic DNA will not be amplified (the PDAR kit for human GAPDH amplification has such primers),

[0303] 9. If a TaqMan™ probe is designed for allelic discrimination, the mismatching nucleotide (the polymorphic site) should be in the middle of the probe rather than at the ends,

[0304] 10. Use primers that contain dA nucleotides near the 3′ ends so that any primer-dimer generated is efficiently degraded by AmpErase™ UNG (mentioned in p. 9 of the manual for EZ RT-PCR kit; P/N402877). If primers cannot be selected with dA nucleotides near the ends, the use of primers with 3′ terminal dU-nucleotides should be considered.

[0305] (See also the general principles of PCR Primer Design by InVitroGen.)

### General Method

[0306] 1. Reverse transcription of total RNA to cDNA should be done with random hexamers (not with oligo-dT). If oligo-dT has to be used long mRNA transcripts or amplicons greater than two kilobases upstream should be avoided, and 18S RNA cannot be used as normalizer,

[0307] 2. Multiplex PCR will only work properly if the control primers are limiting (ABI control reagents do not have their primers limited),

[0308] 3. The range of target cDNA used is 10 ng to 1 μg. If DNA is used (mainly for allelic discrimination studies), the optimum amount is 100 ng to 1 μg,

[0309] 4. It is ideal to treat each RNA preparation with RNAse free DNAse to avoid genomic DNA contamination. Even the best RNA extraction methods yield some genomic DNA. Of course, it is ideal to have primers not amplifying genomic DNA at all but sometimes this may not be possible,

[0310] 5. For optimal results, the reagents (before the preparation of the PCR mix) and the PCR mixture itself (before loading) should be vortexed and mixed well. Otherwise there may be shifting Rn value during the early (0-5) cycles of PCR. It is also important to add probe to the buffer component and allow it to equilibrate at room temperature prior to reagent mix formulation.

### TaqMan™ Primers and Probes

[0311] The TaqMan™ probes ordered from ABI at midi-scale arrive already resuspended at 100 □M. If a 1/20 dilution is made, this gives a 5 μM solution. This stock solution should be aliquoted, frozen and kept in the dark. Using 1 μL of this in a 50 μL reaction gives the recommended 100 nM final concentration.

[0312] The primers arrive lyophilized with the amount given on the tube in pmols (such as 150.000 pmol which is equal to 150 nmol). If X nmol of primer is resuspended in X μL of H2O, the resulting solution is 1 mM. It is best to freeze this stock solution in aliquots. When the 1 mM stock solution is diluted 1/100, the resulting working solution will be 10 μM. To get the recommended 50-900 nM final primer concentration in 50 μL reaction volume, 0.25-4.50 □L should be used per reaction (2.5 μL for 500 nM final concentration).

[0313] The PDAR primers and probes are supplied as a mix in one tube. They have to be used 2.5 μL in a 50 μL reaction volume.

### Setting Up One-Step TaqMan™ Reaction

[0314] One-step real-time PCR uses RNA (as opposed to cDNA) as a template. This is the preferred method if the RNA solution has a low concentration but only if singleplex reactions are run. The disadvantage is that RNA carryover prevention enzyme AmpErase cannot be used in one-step reaction format. In this method, both reverse transcriptase and real-time PCR take place in the same tube. The downstream PCR primer also acts as the primer for reverse transcriptase (random hexamers or oligo-dT cannot be used for reverse transcription in one-step RT-PCR). One-step reaction requires higher dNTP concentration (greater than or equal to 300 mM vs 200 mM) as it combines two reactions needing dNTPs in one. A typical reaction mix for one-step PCR by Gold RT-PCR kit is as follows:

| | |
|---|---|
| H₂O + RNA: | 20.5 μL [24 μL if PDAR is used] |
| 10X TaqMan buffer: | 5.0 μL |
| MgCl₂ (25 mM): | 11.0 μL |
| dATP (10 mM): | 1.5 μL [for final concentration of 300 μM] |
| dCTP (10 mM): | 1.5 μL [for final concentration of 300 μM] |
| dGTP (10 mM): | 1.5 μL [for final concentration of 300 μM] |
| dUTP (20 mM): | 1.5 μL [for final concentration of 600 μM] |
| Primer F (10 μM) *: | 2.5 μL [for final concentration of 500 nM] |
| Primer R (10 μM) *: | 2.5 μL [for final concentration of 500 nM] |
| TaqMan Probe *: | 1.0 μL [for final concentration of 100 nM] |
| AmpliTaq Gold: | 0.25 μL [can be increased for higher efficiency] |
| Reverse Transcriptase: | 0.25 μL |
| RNAse inhibitor: | 1.00 μL |

* If a PDAR is used, 2.5 μL of primer + probe mix used.

[0315] Ideally 10 pg-100 ng RNA should be used in this reaction. Note that decreasing the amount of template from 100 ng to 50 ng will increase the C_{T} value by 1. To decrease a C_{T} value by 3, the initial amount of template should be increased 8-fold. ABI claims that 2 picograms of RNA can be detected by this system and the maximum amount of RNA that can be used is 1 microgram. For routine analysis, 10 pg-100 ng RNA and 100 pg-1 μg genomic DNA can be used.

### Cycling Parameters for One-Step PCR

[0316] Reverse transcription (by MuLV) 48° C. for 30 min.

[0317] AmpliTaq activation 95° C. for 10 min.

[0318] PCR: denaturation 95° C. for 15 sec and annealing/extension 60° C. for 1 min (repeated 40 times) (On ABI 7700, minimum holding time is 15 seconds.)

[0319] The recently introduced EZ One-Step™ RT-PCR kit allows the use of UNG as the incubation time for reverse transcription is 60° C. thanks to the use of a thermostable reverse transcriptase. This temperature also a better option to avoid primer dimers and non-specific bindings at 48° C.

### Operating the ABI 7700

[0320] Make sure the following before starting a run:

[0321] 1. Cycle parameters are correct for the run.

[0322] 2. Choice of spectral compensation is correct (off for singleplex, on for multiplex reactions).

[0323] 3. Choice of “Number of PCR Stages” is correct in the Analysis Options box (Analysis/Options). This may have to be manually assigned after a run if the data is absent in the amplification plot but visible in the plate view, and the X-axis of the amplification is displaying a range of 0-1 cycles.

[0324] 4. No Template Control is labeled as such (for accurate □Rn calculations).

[0325] 5. The choice of dye component should be made correctly before data analysis.

[0326] 6. You must save the run before it starts by giving it a name (not leaving as untitled). Also at the end of the run, first save the data before starting to analyze.

[0327] 7. The ABI software requires extreme caution. Do not attempt to stop a run after clicking on the Run button. You will have problems and if you need to switch off and on the machine, you have to wait for at least an hour to restart the run.

[0328] When analyzing the data, remember that the default setting for baseline is 3-15. If any CT value is <15, the baseline should be changed accordingly (the baseline stop value should be 1-2 smaller than the smallest CT value). For a useful discussion of this matter, see the ABI Tutorial on Setting Baselines and Thresholds. (Interestingly, this issue is best discussed in the manual for TaqMan™ Human Endogenous Control Plate.)

[0329] If the results do not make sense, check the raw spectra for a possible CDC camera saturation during the run. Saturation of CDC camera may be prevented by using optical caps rather than optical adhesive cover. It is also more likely to happen when SYBR Green I is used, when multiplexing and when a high concentration of probe is used.

### Interpretation of Results

[0330] At the end of each reaction, the recorded fluorescence intensity is used for the following calculations:

[0331] Rn+ is the Rn value of a reaction containing all components, Rn− is the Rn value of an unreacted sample (baseline value or the value detected in NTC). ΔRn is the difference between Rn+ and Rn−. It is an indicator of the magnitude of the signal generated by the PCR.

[0332] There are three illustrative methods to quantitate the amount of template:

[0333] 1. Absolute standard method: In this method, a known amount of standard such as in vitro translated RNA (cRNA) is used.

[0334] 2. Relative standard: Known amounts of the target nucleic acid are included in the assay design in each run,

[0335] 3. Comparative CT method: This method uses no known amount of standard but compares the relative amount of the target sequence to any of the reference values chosen and the result is given as relative to the reference value (such as the expression level of resting lymphocytes or a standard cell line).

### The Comparative CT Method (ΔΔCT) for Relative Quantitation of Gene Expression

[0336] This method enables relative quantitation of template and increases sample throughput by eliminating the need for standard curves when looking at expression levels relative to an active reference control (normalizer). For this method to be successful, the dynamic range of both the target and reference should be similar. A sensitive method to control this is to look at how ΔC_{T} (the difference between the two C_{T} values of two PCRs for the same initial template amount) varies with template dilution. If the efficiencies of the two amplicons are approximately equal, the plot of log input amount versus ΔC_{T} will have a nearly horizontal line (a slope of <0.10). This means that both PCRs perform equally efficiently across the range of initial template amounts. If the plot shows unequal efficiency, the standard curve method should be used for quantitation of gene expression. The dynamic range should be determined for both (1) minimum and maximum concentrations of the targets for which the results are accurate and (2) minimum and maximum ratios of two gene quantities for which the results are accurate. In conventional competitive RT-PCR, the dynamic range is limited to a target-to-competitor ratio of about 10:1 to 1:10 (the best accuracy is obtained for 1:1 ratio). The real-time PCR is able to achieve a much wider dynamic range.

[0337] Running the target and endogenous control amplifications in separate tubes and using the standard curve method requires the least amount of optimization and validation. The advantage of using the comparative C_{T} method is that the need for a standard curve is eliminated (more wells are available for samples). It also eliminates the adverse effect of any dilution errors made in creating the standard curve samples.

[0338] As long as the target and normalizer have similar dynamic ranges, the comparative CT method (ΔΔC_{T} method) is the most practical method. It is expected that the normalizer will have a higher expression level than the target (thus, a smaller C_{T} value). The calculations for the quantitation start with getting the difference (ΔC_{T}) between the C_{T} values of the target and the normalizer:

ΔC_{T}=C_{T}(target)−C_{T}(normalizer)

[0339] This value is calculated for each sample to be quantitated (unless, the target is expressed at a higher level than the normalizer, this should be a positive value. It is no harm if it is negative). One of these samples should be chosen as the reference (baseline) for each comparison to be made. The comparative ΔΔC_{T} calculation involves finding the difference between each sample's ΔC_{T} and the baseline's ΔC_{T}. If the baseline value is representing the minimum level of expression, the ΔΔC_{T} values are expected to be negative (because the ΔC_{T} for the baseline sample will be the largest as it will have the greatest CT value). If the expression is increased in some samples and decreased in others, the ΔΔC_{T} values will be a mixture of negative and positive ones. The last step in quantitation is to transform these values to absolute values. The formula for this is:

comparative expression level=2−ΔΔC_{T}

[0340] For expressions increased compared to the baseline level this will be something like 23=8 times increase, and for decreased expression it will be something like 2-3=⅛ of the reference level. Microsoft Excel can be used to do these calculations by simply entering the CT values (there is an online ABI tutorial at http://www.appliedbiosystems.com/support/tutorials/7700 amp/ on the use of spread sheet programs to produce amplification plots; the TaqMan™ Human Endogenous Control Plate protocol also contains detailed instructions on using MS Excel for real-time PCR data analysis).

[0341] The other (absolute) quantification methods are outlined in the ABI User Bulletins (http://docs.appliedbiosystems.com/search.taf?_UserReference=A8658327189850A13A° C598E). The Bulletins #2 and #5 are most useful for the general understanding of real-time PCR and quantification.

[0342] Recommendations on Procedures:

[0343] 1. Use positive-displacement pipettes to avoid inaccuracies in pipetting,

[0344] 2. The sensitivity of real-time PCR allows detection of the target in 2 pg of total RNA. The number of copies of total RNA used in the reaction should ideally be enough to give a signal by 25-30 cycles (preferably less than 100 ng). The amount used should be decreased or increased to achieve this.

[0345] 3. The optimal concentrations of the reagents are as follows:

[0346] i. Magnesium chloride concentration should be between 4 and 7 mM. It is optimized as 5.5 mM for the primers/probes designed using the Primer Express software.

[0347] ii. Concentrations of dNTPs should be balanced with the exception of dUTP (if used). Substitution of dUTP for dTTP for control of PCR product carryover requires twice dUTP that of other dNTPs. While the optimal range for dNTPs is 500 μM to 1 mM (for one-step RT-PCR), for a typical TaqMan reaction (PCR only), 200 μM of each dNTP (400 μM of dUTP) is used.

[0348] iii. Typically 0.25 μL (1.25 U) AmpliTaq DNA Polymerase (5.0 U/μL) is added into each 50 μL reaction. This is the minimum requirement. If necessary, optimization can be done by increasing this amount by 0.25 U increments.

[0349] iv. The optimal probe concentration is 50-200 nM, and the primer concentration is 100-900 nM. Ideally, each primer pair should be optimized at three different temperatures (58, 60 and 620 C for TaqMan primers) and at each combination of three concentrations (50, 300, 900 nM). This means setting up three different sets (for three temperatures) with nine reactions in each (50/50 mM, 50/300 mM, 50/900, 300/50, 300/300, 300/900, 900/50, 900/300, 900/900 mM) using a fixed amount of target template. If necessary, a second round of optimization may improve the results. Optimal performance is achieved by selecting the primer concentrations that provide the lowest CT and highest ΔRn. Similarly, the probe concentration should be optimized for 25-225 nM.

[0350] 4. If AmpliTaq Gold DNA Polymerase is being used, there has to be a 9-12 min pre-PCR heat step at 92-950 C to activate it. If AmpliTaq Gold DNA Polymerase is used, there is no need to set up the reaction on ice. A typical TaqMan reaction consists of 2 min at 500 C for UNG (see below) incubation; 10 min at 95° C. for Polymerase activation, and 40 cycles of 15 sec at 95° C. (denaturation) and 1 min at 60° C. (annealing and extension). A typical reverse transcription cycle (for cDNA synthesis), which should precede the TaqMan reaction if the starting material is total RNA, consists of 10 min at 250 C (primer incubation), 30 min at 48° C. (reverse transcription with conventional reverse transcriptase) and 5 min at 95° C. (reverse transcriptase inactivation).

[0351] 5. AmpErase uracil-N-glycosylase (UNG) is added in the reaction to prevent the reamplification of carry-over PCR products by removing any uracil incorporated into amplicons. This is why dUTP is used rather than dTTP in PCR reaction. UNG does not function above 55° C. and does not cut single-stranded DNA with terminal dU nucleotides. UNG-containing master mix should not be used with one-step RT-PCR unless rTth DNA polymerase is being used for reverse transcription and PCR (TaqMan EZ RT-PCR kit).

[0352] 6. It is necessary to include at least three No Amplification Controls (NAC) as well as three No Template Controls (NTC) in each reaction plate (to achieve a 99.7% confidence level in the definition of +/−thresholds for the target amplification, six replicates of NTCs must be run). NAC former contains sample and no enzyme. It is necessary to rule out the presence of fluorescence contaminants in the sample or in the heat block of the thermal cycler (these would cause false positives). If the absolute fluorescence of the NAC is greater than that of the NTC after PCR, fluorescent contaminants may be present in the sample or in the heating block of the thermal cycler.

[0353] 7. The dynamic range of a primer/probe system and its normalizer should be examined if the ΔΔCT method is going to be used for relative quantitation. This is done by running (in triplicate) reactions of five RNA concentrations (for example, 0, 80 pg/μL, 400 pg/μL, 2 ng/μL and 50 ng/μL). The resulting plot of log of the initial amount vs. CT values (standard curve) should be a (near) straight line for both the target and normalizer real-time RT-PCRs for the same range of total RNA concentrations.

[0354] 8. The passive reference is a dye (ROX) included in the reaction (present in the TaqMan universal PCR master mix). It does not participate in the 5′ nuclease reaction. It provides an internal reference for background fluorescence emission. This is used to normalize the reporter-dye signal. This normalization is for non-PCR-related fluorescence fluctuations occurring well-to-well (concentration or volume differences) or over time and different from the normalization for the amount of cDNA or efficiency of the PCR. Normalization is achieved by dividing the emission intensity of reporter dye by the emission intensity of the passive reference. This gives the ratio defined as Rn.

[0355] 9. If multiplexing is done, the more abundant of the targets will use up all the ingredients of the reaction before the other target gets a chance to amplify. To avoid this, the primer concentrations for the more abundant target should be limited.

[0356] 10. TaqMan Universal PCR master mix should be stored at 2 to 8° C. (not at −20° C.).

[0357] 11. The GAPDH probe supplied with the TaqMan Gold RT-PCR kit is labeled with a JOE reporter dye, the same probe provided within the Pre-Developed TaqMan™ Assay Reagents (PDAR) kit is labeled with VIC. Primers for these human GAPDH assays are designed not to amplify genomic DNA.

[0358] 12. The carryover prevention enzyme, AmpErase UNG, cannot be used with one-step RT-PCR which requires incubation at 48° C. but may be used with the EZ RT-PCR kit.

[0359] 13. One-step RT-PCR can only be used for singleplex reactions, and the only choice for reverse transcription is the downstream primer (not random hexamers or oligo-dT).

[0360] 14. It is ideal to run duplicates to control pipetting errors but this inevitably increases the cost.

[0361] 15. If multiplexing, the spectral compensation option (in Advanced Options) should be checked before the run.

[0362] 16. Normalization for the fluorescent fluctuation by using a passive reference (ROX) in the reaction and for the amount of cDNA/PCR efficiency by using an endogenous control (such as GAPDH, active reference) are different processes.

[0363] 17. ABI 7700 can be used not only for quantitative RT-PCR but also end-point PCR. The latter includes presence/absence assays or allelic discrimination assays (such as SNP typing).

[0364] 18. Shifting Rn values during the early cycles (cycle 0-5) of PCR means initial disequilibrium of the reaction components and does not affect the final results as long as the lower value of baseline range is reset.

[0365] 19. If an abnormal amplification plot has been noted (C_{T} value<15 cycles with amplification signal detected in early cycles), the upper value of the baseline range should be lowered and the samples should be diluted to increase the C_{T} value (a high C_{T} value may also be due to contamination).

[0366] 20. A small ΔRn value (or greater than expected C_{T} value) indicates either poor PCR efficiency or low copy number of the target.

[0367] 21. A standard deviation >0.16 for C_{T} value indicates inaccurate pipetting.

[0368] 22. SYBR Green entry in the Pure Dye Setup should be abbreviated as “SYBR” in capitals. Any other abbreviation or lower case letters will cause problems.

[0369] 23. The SDS software for ABI 7700 have conflicts with the Macintosh Operating System version 8.1. The data should not be analyzed on such computers.

[0370] 24. The ABI 7700 should not be deactivated for extended periods of time. If it has ever been shutdown, it should be allowed to warm up for at least one hour before a run. Leaving the instrument on all times is recommended and is beneficial for the laser. If the machine has been switched on just before a run, an error box stating a firmware version conflict may appear. If this happens, choose the “Auto Download” option.

[0371] 25. The ABI 7700 is only one of the real-time PCR systems available, others include systems from BioRad, Cepheid, Corbett Research, Roche and Stratagene.

### Example 2

### Determining Splice Variants

[0372] For a given gene, an anova approach to detecting splice variants was used. The approach taken was similar to the Affymetrix MIDAS approach. In the exon level data, there is an intensity for each probe set, for each subject. A simple model for the intensity would be an overall gene mean, plus a probe set effect plus a subject effect plus error. Where i indexes the probesets and j the subjects.

Yij=α+βi+γj+εij

[0373] This model applies only when there is no alternate splicing. If probe set i maps to exon e(i) and subject j is in class c(j) then alternate splicing would be represented by the presence of a term δe(i) c(j) in the model. In X:Map annotation, probe sets may match to multiple exons. This is associated with alternate exon layouts in the gene, so a test for a term δic(j), that is a probe set by class interaction, was performed. For simplicity, the subject effect was ignored (this variation becomes part of the noise).

### Example 3

### Gene Transcripts Distinguishing Sepsis from Post-Surgical Inflammation

[0374] Any of the gene transcripts in Table 7 are able to distinguish sepsis from post-surgical inflammation (the sign on values in the column logFC indicates comparative up or down regulation. By example, transcripts for ankdd1a can be expected to be relatively up-regulated in sepsis compared to post-surgical and transcripts for OTX1 can be expected to be relatively down-regulated in sepsis compared to post-surgical).

### Example 4

### Gene Transcripts Distinguishing Sepsis from inSIRS

[0375] Any of the gene transcripts in Table 8 are able to distinguish sepsis from inSIRS (the sign on values in the column logFC indicates comparative up or down regulation).

### Example 7

### Genes Distinguishing inSIRS from Post-Surgical

[0376] Gene transcripts in Table 9 may able to distinguish inSIRS and post-surgical inflammation (the sign on values in the column logFC indicates comparative up or down regulation).

### Example 8

### Area Under Curve (AUC) for Classifiers Separating Groups Using Exons from Splice Variants Using Several Statistical Techniques

[0377] Table 10 summarizes the area under the ROC curves (AAUC) as percentages. The closer to 100% these are the better the classifier.

[0378] It can be seen by looking at the percentage AUC for the various statistical techniques that Post-surgical inflammation versus Sepsis, Sepsis versus inSIRS, Post-surgical inflammation and inSIRS versus Sepsis and Post-surgical versus inflammation Sepsis and inSIRS provide good classifiers.

### Example 9

### Monitoring of Post-Surgical Patients

[0379] All surgery results in an acute phase response and inflammation and the severity of the response is proportional to the level of insult. Many cardiac surgery and abdominal surgery patients develop a bacterial translocation and endotoxemia which can lead to organ failure and death unless appropriately managed. In fact, it has been demonstrated that patients with pre-existing high plasma levels of anti-endotoxin antibody have a better survival rate compared to those patients with low anti-endotoxin plasma antibodies demonstrating that endotoxin and the immune response to endotoxin play a key role in survival in these patients. This post-surgical immune response often presents clinically as fever. Nurses and intensivists working with post-surgical patients with fever must therefore decide whether the cause of the fever relates to bacterial infection. The IRC biomarkers of the present invention, which are able to distinguish between post-surgical inflammation, SIRS and sepsis, would therefore be useful in determining an appropriate course of action in such patients which could include the use of antibiotics, anti-pyretics, immune modulators and/or anti-inflammatories. Monitoring such patients with these biomarkers would also allow for informed decisions on when to withdraw such treatments.

### Example 10

### Monitoring Trauma and Burns Patients

[0380] Severe trauma (especially head trauma) and burns patients have high levels of tissue damage and the resultant acute phase response and inflammation often causes swelling, fever and damage to vital organs such as the brain and skin. Such patients are often treated with steroids (or other anti-inflammatories) to reduce the level of inflammation which then makes then susceptible to bacterial infection. Brain damaged patients also often develop fevers. A therapeutic balancing act between the use of anti-inflammatories, immune modulating agents and antibiotics is therefore created in these patients. The IRC biomarkers of the present invention, which are able to distinguish between sterile inflammation and inflammation caused by bacterial infection, are therefore useful monitoring tools that are able to assist medical practitioners in determining appropriate therapies for the best outcome in such patients.

### Example 11

### Monitoring Patients in Intensive Care

[0381] Patients in intensive care are usually administered a number of therapeutic compounds—many of which have opposing actions on the immune system. Further, intensive care patients often have, or develop, inSIRS which can lead to multi-organ failure and death. Further still, intensive care patients often develop sepsis through hospital acquired infection. However, the ultimate aim of intensive care is to ensure the patient survives and is discharged to a general ward in the minimum time. The above factors confound this aim. Monitoring intensive care patients on a regular basis with the IRC biomarkers of the present invention will allow medical practitioners to: determine the level of inflammation, determine if the patient has a hospital acquired infection, and determine response to therapy. Information provided by these biomarkers will therefore allow medical practitioners to tailor and modify therapies to ensure patients survive and spend less time in intensive care. Less time in intensive care leads to considerable savings in medical expenses. In addition, informed use of antibiotics leads to less usage and further savings in medical expenses. Appropriate and informed use of antibiotics also leads to less antibiotic resistance.

### Example 12

### Patients with Fever—Distinguishing Between Inflammation, inSIRS and Sepsis

[0382] Many patients present to hospitals, or are in hospital, with fever of unknown origin. Fever can be caused by sterile inflammation or by microbial infection. The IRC biomarkers of the present invention, which are able to distinguish between inflammation, SIRS and sepsis, will be useful in screening, stratification, diagnosing and determining appropriate therapies in such patients.

### Example 13

### Determining the Severity of Immune Response to Insult

[0383] The IRC biomarkers disclosed herein are able to determine an inflammatory response continuum from the less severe inflammatory response of post-surgery through to the severe inflammatory response to bacterial infection (sepsis). Determining where a patient lies on this continuum is important with respect to deciding what therapies (if any) should be administered.

### Example 14

### Provision of a Prognosis

[0384] The IRC biomarkers of the present invention permit qualitative or quantitative grading of inflammatory response and provide a means to separate sepsis, inSIRS and post-surgical inflammation from each other. This, in turn, allows for the determination of a prognosis in patients determined to have any one of sepsis, inSIRS or post-surgical inflammation. It has been demonstrated that in-patients with inSIRS have a 6.9 times higher 28-day mortality compared to those without SIRS (Comstedt et al., 2007, Scand. J Trauma Resusc. Emerg. Med. 27: 17-67. 2009; Esteban et al., 2007, Crit. Care Med. 35(5): 1284-1289). Further, with respect to risk of dying, there is a graded severity from inSIRS to sepsis, severe sepsis and septic shock, with an associated 28-day mortality of approximately 10%, 20%, 20-40% and 40-60% respectively (Brun-Buisson, C., 2000, Intensive Care Medicine 26, Suppl 1: S64-74). Such information allows for informed decisions on choice of therapy and how aggressively to treat.

[0385] The disclosure of every patent, patent application, and publication cited herein is hereby incorporated herein by reference in its entirety.

[0386] The citation of any reference herein should not be construed as an admission that such reference is available as “Prior Art” to the instant application.

[0387] Throughout the specification the aim has been to describe the preferred embodiments of the invention without limiting the invention to any one embodiment or specific collection of features. Those of skill in the art will therefore appreciate that, in light of the instant disclosure, various modifications and changes can be made in the particular embodiments exemplified without departing from the scope of the present invention. All such modifications and changes are intended to be included within the scope of the appended claims.

Lengthy table referenced here
US20140037649A1-20140206-T00001
Please refer to the end of the specification for access instructions.

LENGTHY TABLES
The patent application contains a lengthy table section. A copy of the table is available in electronic form from the USPTO web site (http://seqdata.uspto.gov/?pageRequest=docDetail&DocID=US20140037649A1). An electronic copy of the table will also be available from the USPTO upon request and payment of the fee set forth in 37 CFR 1.19(b)(3).

The application's sequence listing, which the Patent Office published only in electronic form, follows.

SEQUENCE LISTING (1007 sequences)

SEQ ID NO: 1 - DNA, 4206 bp, Homo sapiens
atggaagaaataccagtaaaagttgctgtaagaattagacctctgctttgcaaagaagctcttcataatcatcaagtttgtgtgagagttattccaaacagccagcaagttatcattgggagagatagagtcttcacttttgattttgtttttggcaaaaattccactcaagatgaagtttataacacatgtataaagcccctagtgttgtcactcattgagggctataatgcaactgtttttgcctatggacaaactggatctgggaagacatacaccattggagggggccatattgcttcagttgtggagggccaaaagggtatcattcctcgagctattcaagaaatatttcaaagcatctctgaacatcctagcattgactttaatgtaaaagtatcttatatagaagtgtacaaggaagacctaagagatcttctagaattggagacatccatgaaggatcttcacatccgagaagatgaaaaaggaaacacagtgattgttggggccaaggaatgccatgtggagagtgcaggtgaagtgatgagtcttttggagatggggaatgcagccagacatacaggtaccactcaaatgaatgagcactccagcagatcacatgcaatttttacaatcagcatttgtcaagttcataaaaatatggaggcagctgaagatggatcatggtattcccctcggcatattgtctcaaagttccactttgtggatttggcaggatcagaaagagtaaccaaaacggggaatactggtgaacggttcaaagaatccattcaaatcaatagtggattgctggctttaggaaatgtaataagcgctcttggggacccacgcaggaagagttcacatattccatatagggatgctaaaattacccggcttctgaaagattctctgggaggcagtgctaagactgtcatgatcacatgtgtcagcccctcctcctcgaattttgatgagtccttaaattctctcaaatatgccaacagagcacggaacattagaaacaaacccactgtaaacttcagccccgagtcagaccgtatagatgaaatggaatttgagattaaattgcttcgagaagctttgcaaagccagcaggctggtgtcagccaaactacccagatcaatcgagaagggagtcctgatacaaataggattcattctcttgaggagcaagtagctcagcttcaaggagaatgtctgggttaccagtgttgtgtagaagaagcctttaccttcctggttgacctaaaagatactgtcagactaaacgaaaagcagcaacacaaactgcaggagtggtttaacatgatccaagaggtcaggaaggctgtcctcacctcatttcgaggaatcggaggcactgcaagtctggaagaaggaccacagcatgttacagttctccagctgaagagagagcttaagaaatgccagtgtgtgcttgctgctgatgaagtagtatttaatcagaaggaactggaggtgaaggaactgaagaatcaagtgcagatgatggtacaggaaaacaaagggcatgctgtatctttgaaagaagcgcaaaaagtgaatagactgcagaatgaaaaaataatagaacaacaacttcttgtggatcaactgagtgaagaactaacaaaacttaacctgtcagtgacttcttcagctaaagaaaattgtggagatgggccagatgccaggatccctgaaaggagaccatatactgtaccatttgatactcatttggggcattatatttatatcccatcaagacaagattccaggaaggtccacacaagtccgcctatgtactctctggatcgaatatttgctggatttcgaacacgaagtcagatgctgttgggtcacatagaagaacaagataaggtcctccactgccaattttctgataacagtgatgatgaagaatcagaaggccaagagaaatctggaactagatgtagaagtcgttcatggattcagaagccagactctgtttgttcccttgttgaattgagtgatactcaggatgaaacacaaaagtcagatttggagaatgaagatttaaagattgattgtctccaggagagtcaagaattgaatttgcaaaaattaaagaattcagaacgcatacttactgaagctaaacaaaaaatgagagaacttacaattaacatcaagatgaaggaagatctgattaaagaattaataaaaacaggtaatgatgccaagtctgtaagcaagcagtattctttgaaagtaacaaagctagagcatgatgcagaacaggcaaaagtcgaactgattgaaacacaaaagcagctacaggagctggaaaacaaagatctttctgatgttgcaatgaaggtaaaattacagaaagagtttcgtaaaaagatggatgctgcaaagctgagagttcaggtcttgcagaagaagcaacaagatagtaagaaactggcatcactgtcaatccaaaatgagaaacgtgctaatgagctagagcagagtgtagatcacatgaaatatcaaaagatacagctacaaagaaaactacgagaagaaaatgaaaaaaggaagcaactggatgcagtaattaagcgggaccagcaaaaaatcaaagaaatacaattaaaaacaggacaggaagaaggtctaaaaccgaaagctgaggaccttgatgcatgtaacttgaaaaggagaaaaggttcgtttggaagtatagaccatctccagaaattggatgagcaaaagaaatggttagatgaagaagtagagaaagttctgaaccaacgccaagaattagaggagctggaagcagacttaaagaaacgggaggccatagtttctaagaaggaggctctgttacaggagaagagtcacctggaaaataagaaattgagatctagtcaggccttaaacacagatagtttgaaaatatcaactcgcctgaacttactggaacaagagttgtctgaaaagaatgtgcagctccagaccagtacagctgaggagaaaacaaagatttcagaacaagttgaagtcctccagaaagaaaaggatcagctccagaaacgcagacacaatgtggatgaaaaacttaaaaatggtagagtgttatcacctgaagaagaacatgttcttttccaacttgaagaagggattgaagctttggaagctgcaattgaatacaggaatgaaagtatccagaatcgccagaagtcacttagagcatcattccataacctctctcgtggtgaagcaaatgtcttggaaaagctagcttgcctgagtcctgttgagattagaactattcttttcagatatttcaataaggtggtgaatttgcgagaagctgaacggaaacaacagttatataatgaagaaatgaaaatgaaagttctggaacgggataatatggttcgtgaattagaatctgcactggaccatctaaaattgcagtgtgaccggagactgaccctccagcaaaaggaacacgaacaaaagatgcagttgctattacatcatttcaaagaacaagatggagaaggcattatggaaactttcaaaacatatgaagataaaatccagcagttggaaaaagatctttatttctataagaaaaccagccgggatcataagaagaaacttaaggaactggtaggggaagcaattcggcggcaactagcaccatcagagtatcaagaggctggagatggagtcctgaagccagaaggaggaggcatgctttcagaagaattaaaatgggcatccagacctgaaagtatgaaattaagtggaagagaaagagaaatggacagttcagcaagcagcttaagaacacagccaaatcctcaaaagctctgggaagatatcccagaattacctccaattcatagttctttagcaccccccagtgggcatatgttaggtaatgagaataaaacagaaacagatgataatcagtttacaaaatctcacagtcgactgtcatcccaaattcaggttgtgggaaatgtgggacgacttcatggtgtcacacctgtaaaactgtgtcgaaaagaattacgtcaaatttccgccttggaactatcattgcgacgttccagtcttggagttggcattggatcaatggctgctgattccatcgaagtatctaggaaaccaagggacttaaaaacttag

SEQ ID NO: 2 - protein, 1401 aa, Homo sapiens
MEEIPVKVAVRIRPLLCKEALHNHQVCVRVIPNSQQVIIGRDRVFTFDFVFGKNSTQDEVYNTCIKPLVLSLIEGYNATVFAYGQTGSGKTYTIGGGHIASVVEGQKGIIPRAIQEIFQSISEHPSIDFNVKVSYIEVYKEDLRDLLELETSMKDLHIREDEKGNTVIVGAKECHVESAGEVMSLLEMGNAARHTGTTQMNEHSSRSHAIFTISICQVHKNMEAAEDGSWYSPRHIVSKFHFVDLAGSERVTKTGNTGERFKESIQINSGLLALGNVISALGDPRRKSSHIPYRDAKITRLLKDSLGGSAKTVMITCVSPSSSNFDESLNSLKYANRARNIRNKPTVNFSPESDRIDEMEFEIKLLREALQSQQAGVSQTTQINREGSPDTNRIHSLEEQVAQLQGECLGYQCCVEEAFTFLVDLKDTVRLNEKQQHKLQEWFNMIQEVRKAVLTSFRGIGGTASLEEGPQHVTVLQLKRELKKCQCVLAADEVVFNQKELEVKELKNQVQMMVQENKGHAVSLKEAQKVNRLQNEKIIEQQLLVDQLSEELTKLNLSVTSSAKENCGDGPDARIPERRPYTVPFDTHLGHYIYIPSRQDSRKVHTSPPMYSLDRIFAGFRTRSQMLLGHIEEQDKVLHCQFSDNSDDEESEGQEKSGTRCRSRSWIQKPDSVCSLVELSDTQDETQKSDLENEDLKIDCLQESQELNLQKLKNSERILTEAKQKMRELTINIKMKEDLIKELIKTGNDAKSVSKQYSLKVTKLEHDAEQAKVELIETQKQLQELENKDLSDVAMKVKLQKEFRKKMDAAKLRVQVLQKKQQDSKKLASLSIQNEKRANELEQSVDHMKYQKIQLQRKLREENEKRKQLDAVIKRDQQKIKEIQLKTGQEEGLKPKAEDLDACNLKRRKGSFGSIDHLQKLDEQKKWLDEEVEKVLNQRQELEELEADLKKREAIVSKKEALLQEKSHLENKKLRSSQALNTDSLKISTRLNLLEQELSEKNVQLQTSTAEEKTKISEQVEVLQKEKDQLQKRRHNVDEKLKNGRVLSPEEEHVLFQLEEGIEALEAAIEYRNESIQNRQKSLRASFHNLSRGEANVLEKLACLSPVEIRTILFRYFNKVVNLREAERKQQLYNEEMKMKVLERDNMVRELESALDHLKLQCDRRLTLQQKEHEQKMQLLLHHFKEQDGEGIMETFKTYEDKIQQLEKDLYFYKKTSRDHKKKLKELVGEAIRRQLAPSEYQEAGDGVLKPEGGGMLSEELKWASRPESMKLSGREREMDSSASSLRTQPNPQKLWEDIPELPPIHSSLAPPSGHMLGNENKTETDDNQFTKSHSRLSSQIQVVGNVGRLHGVTPVKLCRKELRQISALELSLRRSSLGVGIGSMAADSIEVSRKPRDLKT

SEQ ID NO: 3 - DNA, 3915 bp, Homo sapiens
atggaagaaataccagtaaaagttgctgtaagaattagacctctgctttgcaaagaagctcttcataatcatcaagtttgtgtgagagttattccaaacagccagcaagttatcattgggagagatagagtcttcacttttgattttgtttttggcaaaaattccactcaagatgaagtttataacacatgtataaagcccctagtgttgtcactcattgagggctataatgcaactgtttttgcctatggacaaactggatctgggaagacatacaccattggagggggccatattgcttcagttgtggagggccaaaagggtatcattcctcgagctattcaagaaatatttcaaagcatctctgaacatcctagcattgactttaatgtaaaagtatcttatatagaagtgtacaaggaagacctaagagatcttctagaattggagacatccatgaaggatcttcacatccgagaagatgaaaaaggaaacacagtgattgttggggccaaggaatgccatgtggagagtgcaggtgaagtgatgagtcttttggagatggggaatgcagccagacatacaggtaccactcaaatgaatgagcactccagcagatcacatgcaatttttacaatcagcatttgtcaagttcataaaaatatggaggcagctgaagatggatcatggtattcccctcggcatattgtctcaaagttccactttgtggatttggcaggatcagaaagagtaaccaaaacggggaatactggtgaacggttcaaagaatccattcaaatcaatagtggattgctggctttaggaaatgtaataagcgctcttggggacccacgcaggaagagttcacatattccatatagggatgctaaaattacccggcttctgaaagattctctgggaggcagtgctaagactgtcatgatcacatgtgtcagcccctcctcctcgaattttgatgagtccttaaattctctcaaatatgccaacagagcacggaacattagaaacaaacccactgtaaacttcagccccgagtcagaccgtatagatgaaatggaatttgagattaaattgcttcgagaagctttgcaaagccagcaggctggtgtcagccaaactacccagatcaatcgagaagggagtcctgatacaaataggattcattctcttgaggagcaagtagctcagcttcaaggagaatgtctgggttaccagtgttgtgtagaagaagcctttaccttcctggttgacctaaaagatactgtcagactaaacgaaaagcagcaacacaaactgcaggagtggtttaacatgatccaagaggtcaggaaggctgtcctcacctcatttcgaggaatcggaggcactgcaagtctggaagaaggaccacagcatgttacagttctccagctgaagagagagcttaagaaatgccagtgtgtgcttgctgctgatgaagtagtatttaatcagaaggaactggaggtgaaggaactgaagaatcaagtgcagatgatggtacaggaaaacaaagggcatgctgtatctttgaaagaagcgcaaaaagtgaatagactgcagaatgaaaaaataatagaacaacaacttcttgtggatcaactgagtgaagaactaacaaaacttaacctgtcagtgacttcttcagctaaagaaaattgtggagatgggccagatgccaggatccctgaaaggagaccatatactgtaccatttgatactcatttggggcattatatttatatcccatcaagacaagattccaggaaggtccacacaagtccgcctatgtactctctggatcgaatatttgctggatttcgaacacgaagtcagatgctgttgggtcacatagaagaacaagataaggtcctccactgccaattttctgataacagtgatgatgaagaatcagaaggccaagagaaatctggaactagatgtagaagtcgttcatggattcagaagccagactctgtttgttcccttgttgaattgagtgatactcaggatgaaacacaaaagtcagatttggagaatgaagatttaaagattgattgtctccaggagagtcaagaattgaatttgcaaaaattaaagaattcagaacgcatacttactgaagctaaacaaaaaatgagagaacttacaattaacatcaagatgaaggaagatctgattaaagaattaataaaaacaggtaatgatgccaagtctgtaagcaagcagtattctttgaaagtaacaaagctagagcatgatgcagaacaggcaaaagtcgaactgattgaaacacaaaagcagctacaggagctggaaaacaaagatctttctgatgttgcaatgaaggtaaaattacagaaagagtttcgtaaaaagatggatgctgcaaagctgagagttcaggtcttgcagaagaagcaacaagatagtaagaaactggcatcactgtcaatccaaaatgagaaacgtgctaatgagctagagcagagtgtagatcacatgaaatatcaaaagatacagctacaaagaaaactacgagaagaaaatgaaaaaaggaagcaactggatgcagtaattaagcgggaccagcaaaaaatcaaagccttaaacacagatagtttgaaaatatcaactcgcctgaacttactggaacaagagttgtctgaaaagaatgtgcagctccagaccagtacagctgaggagaaaacaaagatttcagaacaagttgaagtcctccagaaagaaaaggatcagctccagaaacgcagacacaatgtggatgaaaaacttaaaaatggtagagtgttatcacctgaagaagaacatgttcttttccaacttgaagaagggattgaagctttggaagctgcaattgaatacaggaatgaaagtatccagaatcgccagaagtcacttagagcatcattccataacctctctcgtggtgaagcaaatgtcttggaaaagctagcttgcctgagtcctgttgagattagaactattcttttcagatatttcaataaggtggtgaatttgcgagaagctgaacggaaacaacagttatataatgaagaaatgaaaatgaaagttctggaacgggataatatggttcgtgaattagaatctgcactggaccatctaaaattgcagtgtgaccggagactgaccctccagcaaaaggaacacgaacaaaagatgcagttgctattacatcatttcaaagaacaagatggagaaggcattatggaaactttcaaaacatatgaagataaaatccagcagttggaaaaagatctttatttctataagaaaaccagccgggatcataagaagaaacttaaggaactggtaggggaagcaattcggcggcaactagcaccatcagagtatcaagaggctggagatggagtcctgaagccagaaggaggaggcatgctttcagaagaattaaaatgggcatccagacctgaaagtatgaaattaagtggaagagaaagagaaatggacagttcagcaagcagcttaagaacacagccaaatcctcaaaagctctgggaagatatcccagaattacctccaattcatagttctttagcaccccccagtgggcatatgttaggtaatgagaataaaacagaaacagatgataatcagtttacaaaatctcacagtcgactgtcatcccaaattcaggttgtgggaaatgtgggacgacttcatggtgtcacacctgtaaaactgtgtcgaaaagaattacgtcaaatttccgccttggaactatcattgcgacgttccagtcttggagttggcattggatcaatggctgctgattccatcgaagtatctaggaaaccaagggacttaaaaacttag

SEQ ID NO: 4 - protein, 1304 aa, Homo sapiens
MEEIPVKVAVRIRPLLCKEALHNHQVCVRVIPNSQQVIIGRDRVFTFDFVFGKNSTQDEVYNTCIKPLVLSLIEGYNATVFAYGQTGSGKTYTIGGGHIASVVEGQKGIIPRAIQEIFQSISEHPSIDFNVKVSYIEVYKEDLRDLLELETSMKDLHIREDEKGNTVIVGAKECHVESAGEVMSLLEMGNAARHTGTTQMNEHSSRSHAIFTISICQVHKNMEAAEDGSWYSPRHIVSKFHFVDLAGSERVTKTGNTGERFKESIQINSGLLALGNVISALGDPRRKSSHIPYRDAKITRLLKDSLGGSAKTVMITCVSPSSSNFDESLNSLKYANRARNIRNKPTVNFSPESDRIDEMEFEIKLLREALQSQQAGVSQTTQINREGSPDTNRIHSLEEQVAQLQGECLGYQCCVEEAFTFLVDLKDTVRLNEKQQHKLQEWFNMIQEVRKAVLTSFRGIGGTASLEEGPQHVTVLQLKRELKKCQCVLAADEVVFNQKELEVKELKNQVQMMVQENKGHAVSLKEAQKVNRLQNEKIIEQQLLVDQLSEELTKLNLSVTSSAKENCGDGPDARIPERRPYTVPFDTHLGHYIYIPSRQDSRKVHTSPPMYSLDRIFAGFRTRSQMLLGHIEEQDKVLHCQFSDNSDDEESEGQEKSGTRCRSRSWIQKPDSVCSLVELSDTQDETQKSDLENEDLKIDCLQESQELNLQKLKNSERILTEAKQKMRELTINIKMKEDLIKELIKTGNDAKSVSKQYSLKVTKLEHDAEQAKVELIETQKQLQELENKDLSDVAMKVKLQKEFRKKMDAAKLRVQVLQKKQQDSKKLASLSIQNEKRANELEQSVDHMKYQKIQLQRKLREENEKRKQLDAVIKRDQQKIKALNTDSLKISTRLNLLEQELSEKNVQLQTSTAEEKTKISEQVEVLQKEKDQLQKRRHNVDEKLKNGRVLSPEEEHVLFQLEEGIEALEAAIEYRNESIQNRQKSLRASFHNLSRGEANVLEKLACLSPVEIRTILFRYFNKVVNLREAERKQQLYNEEMKMKVLERDNMVRELESALDHLKLQCDRRLTLQQKEHEQKMQLLLHHFKEQDGEGIMETFKTYEDKIQQLEKDLYFYKKTSRDHKKKLKELVGEAIRRQLAPSEYQEAGDGVLKPEGGGMLSEELKWASRPESMKLSGREREMDSSASSLRTQPNPQKLWEDIPELPPIHSSLAPPSGHMLGNENKTETDDNQFTKSHSRLSSQIQVVGNVGRLHGVTPVKLCRKELRQISALELSLRRSSLGVGIGSMAADSIEVSRKPRDLKT

SEQ ID NO: 5 - DNA, 861 bp, Homo sapiens
atgtactctctggatcgaatatttgctggatttcgaacacgaagtcagatgctgttgggtcacatagaagaacaagataaggtcctccactgccaattttctgataacagtgatgatgaagaatcagaaggccaagagaaatctggaactagatgtagaagtcgttcatggattcagaagccagactctgtttgttcccttgttgaattgagtgatactcaggatgaaacacaaaagtcagatttggagaatgaagatttaaagattgattgtctccaggagagtcaagaattgaatttgcaaaaattaaagaattcagaacgcatacttactgaagctaaacaaaaaatgagagaacttacaattaacatcaagatgaaggaagatctgattaaagaattaataaaaacaggtaatgatgccaagtctgtaagcaagcagtattctttgaaagtaacaaagctagagcatgatgcagaacaggcaaaagtcgaactgattgaaacacaaaagcagctacaggagctggaaaacaaagatctttctgatgttgcaatgaaggtaaaattacagaaagagtttcgtaaaaagatggatgctgcaaagctgagagttcaggtcttgcagaagaagcaacaagatagtaagaaactggcatcactgtcaatccaaaatgagaaacgtgctaatgagctagagcagagtgtagatcacatgaaatatcaaaagatacagctacaaagaaaactacgagaagaaaatgaaaaaaggaagcaactggatgcagtaattaagcgggaccagcaaaaaatcaaagtaatattgtcatacattcctgctaagtataatatgaaatgttaa

SEQ ID NO: 6 - protein, 286 aa, Homo sapiens
MYSLDRIFAGFRTRSQMLLGHIEEQDKVLHCQFSDNSDDEESEGQEKSGTRCRSRSWIQKPDSVCSLVELSDTQDETQKSDLENEDLKIDCLQESQELNLQKLKNSERILTEAKQKMRELTINIKMKEDLIKELIKTGNDAKSVSKQYSLKVTKLEHDAEQAKVELIETQKQLQELENKDLSDVAMKVKLQKEFRKKMDAAKLRVQVLQKKQQDSKKLASLSIQNEKRANELEQSVDHMKYQKIQLQRKLREENEKRKQLDAVIKRDQQKIKVILSYIPAKYNMKC

SEQ ID NO: 7 - DNA, 4008 bp, Homo sapiens
atggaagaaataccagtaaaagttgctgtaagaattagacctctgctttgcaaagaagctcttcataatcatcaagtttgtgtgagagttattccaaacagccagcaagttatcattgggagagatagagtcttcacttttgattttgtttttggcaaaaattccactcaagatgaagtttataacacatgtataaagcccctagtgttgtcactcattgagggctataatgcaactgtttttgcctatggacaaactggatctgggaagacatacaccattggagggggccatattgcttcagttgtggagggccaaaagggtatcattcctcgagctattcaagaaatatttcaaagcatctctgaacatcctagcattgactttaatgtaaaagtatcttatatagaagtgtacaaggaagacctaagagatcttctagaattggagacatccatgaaggatcttcacatccgagaagatgaaaaaggaaacacagtgattgttggggccaaggaatgccatgtggagagtgcaggtgaagtgatgagtcttttggagatggggaatgcagccagacatacaggtaccactcaaatgaatgagcactccagcagatcacatgcaatttttacaatcagcatttgtcaagttcataaaaatatggaggcagctgaagatggatcatggtattcccctcggcatattgtctcaaagttccactttgtggatttggcaggatcagaaagagtaaccaaaacggggaatactggtgaacggttcaaagaatccattcaaatcaatagtggattgctggctttaggaaatgtaataagcgctcttggggacccacgcaggaagagttcacatattccatatagggatgctaaaattacccggcttctgaaagattctctgggaggcagtgctaagactgtcatgatcacatgtgtcagcccctcctcctcgaattttgatgagtccttaaattctctcaaatatgccaacagagcacggaacattagaaacaaacccactgtaaacttcagccccgagtcagaccgtatagatgaaatggaatttgagattaaattgcttcgagaagctttgcaaagccagcaggctggtgtcagccaaactacccagatcaatcgagaagggagtcctgatacaaataggattcattctcttgaggagcaagtagctcagcttcaaggagaatgtctgggttaccagtgttgtgtagaagaagcctttaccttcctggttgacctaaaagatactgtcagactaaacgaaaagcagcaacacaaactgcaggagtggtttaacatgatccaagaggtcaggaaggctgtcctcacctcatttcgaggaatcggaggcactgcaagtctggaagaaggaccacagcatgttacagttctccagctgaagagagagcttaagaaatgccagtgtgtgcttgctgctgatgaagtagtatttaatcagaaggaactggaggtgaaggaactgaagaatcaagtgcagatgatggtacaggaaaacaaagggcatgctgtatctttgaaagaagcgcaaaaagtgaatagactgcagaatgaaaaaataatagaacaacaacttcttgtggatcaactgagtgaagaactaacaaaacttaacctgtcagtgacttcttcagctaaagaaaattgtggagatgggccagatgccaggatccctgaaaggagaccatatactgtaccatttgatactcatttggggcattatatttatatcccatcaagacaagattccaggaaggtccacacaagtccgcctatgtactctctggatcgaatatttgctggatttcgaacacgaagtcagatgctgttgggtcacatagaagaacaagataaggtcctccactgccaattttctgataacagtgatgatgaagaatcagaaggccaagagaaatctggaactagatgtagaagtcgttcatggattcagaagccagactctgtttgttcccttgttgaattgagtgatactcaggatgaaacacaaaagtcagatttggagaatgaagatttaaagattgattgtctccaggagagtcaagaattgaatttgcaaaaattaaagaattcagaacgcatacttactgaagctaaacaaaaaatgagagaacttacaattaacatcaagatgaaggaagatctgattaaagaattaataaaaacaggtaatgatgccaagtctgtaagcaagcagtattctttgaaagtaacaaagctagagcatgatgcagaacaggcaaaagtcgaactgattgaaacacaaaagcagctacaggagctggaaaacaaagatctttctgatgttgcaatgaaggtaaaattacagaaagagtttcgtaaaaagatggatgctgcaaagctgagagttcaggaaatacaattaaaaacaggacaggaagaaggtctaaaaccgaaagctgaggaccttgatgcatgtaacttgaaaaggagaaaaggttcgtttggaagtatagaccatctccagaaattggatgagcaaaagaaatggttagatgaagaagtagagaaagttctgaaccaacgccaagaattagaggagctggaagcagacttaaagaaacgggaggccatagtttctaagaaggaggctctgttacaggagaagagtcacctggaaaataagaaattgagatctagtcaggccttaaacacagatagtttgaaaatatcaactcgcctgaacttactggaacaagagttgtctgaaaagaatgtgcagctccagaccagtacagctgaggagaaaacaaagatttcagaacaagttgaagtcctccagaaagaaaaggatcagctccagaaacgcagacacaatgtggatgaaaaacttaaaaatggtagagtgttatcacctgaagaagaacatgttcttttccaacttgaagaagggattgaagctttggaagctgcaattgaatacaggaatgaaagtatccagaatcgccagaagtcacttagagcatcattccataacctctctcgtggtgaagcaaatgtcttggaaaagctagcttgcctgagtcctgttgagattagaactattcttttcagatatttcaataaggtggtgaatttgcgagaagctgaacggaaacaacagttatataatgaagaaatgaaaatgaaagttctggaacgggataatatggttcgtgaattagaatctgcactggaccatctaaaattgcagtgtgaccggagactgaccctccagcaaaaggaacacgaacaaaagatgcagttgctattacatcatttcaaagaacaagatggagaaggcattatggaaactttcaaaacatatgaagataaaatccagcagttggaaaaagatctttatttctataagaaaaccagccgggatcataagaagaaacttaaggaactggtaggggaagcaattcggcggcaactagcaccatcagagtatcaagaggctggagatggagtcctgaagccagaaggaggaggcatgctttcagaagaattaaaatgggcatccagacctgaaagtatgaaattaagtggaagagaaagagaaatggacagttcagcaagcagcttaagaacacagccaaatcctcaaaagctctgggaagatatcccagaattacctccaattcatagttctttagcaccccccagtgggcatatgttaggtaatgagaataaaacagaaacagatgataatcagtttacaaaatctcacagtcgactgtcatcccaaattcaggttgtgggaaatgtgggacgacttcatggtgtcacacctgtaaaactgtgtcgaaaagaattacgtcaaatttccgccttggaactatcattgcgacgttccagtcttggagttggcattggatcaatggctgctgattccatcgaagtatctaggaaaccaagggacttaaaaacttag

SEQ ID NO: 8 - protein, 1335 aa, Homo sapiens
MEEIPVKVAVRIRPLLCKEALHNHQVCVRVIPNSQQVIIGRDRVFTFDFVFGKNSTQDEVYNTCIKPLVLSLIEGYNATVFAYGQTGSGKTYTIGGGHIASVVEGQKGIIPRAIQEIFQSISEHPSIDFNVKVSYIEVYKEDLRDLLELETSMKDLHIREDEKGNTVIVGAKECHVESAGEVMSLLEMGNAARHTGTTQMNEHSSRSHAIFTISICQVHKNMEAAEDGSWYSPRHIVSKFHFVDLAGSERVTKTGNTGERFKESIQINSGLLALGNVISALGDPRRKSSHIPYRDAKITRLLKDSLGGSAKTVMITCVSPSSSNFDESLNSLKYANRARNIRNKPTVNFSPESDRIDEMEFEIKLLREALQSQQAGVSQTTQINREGSPDTNRIHSLEEQVAQLQGECLGYQCCVEEAFTFLVDLKDTVRLNEKQQHKLQEWFNMIQEVRKAVLTSFRGIGGTASLEEGPQHVTVLQLKRELKKCQCVLAADEVVFNQKELEVKELKNQVQMMVQENKGHAVSLKEAQKVNRLQNEKIIEQQLLVDQLSEELTKLNLSVTSSAKENCGDGPDARIPERRPYTVPFDTHLGHYIYIPSRQDSRKVHTSPPMYSLDRIFAGFRTRSQMLLGHIEEQDKVLHCQFSDNSDDEESEGQEKSGTRCRSRSWIQKPDSVCSLVELSDTQDETQKSDLENEDLKIDCLQESQELNLQKLKNSERILTEAKQKMRELTINIKMKEDLIKELIKTGNDAKSVSKQYSLKVTKLEHDAEQAKVELIETQKQLQELENKDLSDVAMKVKLQKEFRKKMDAAKLRVQEIQLKTGQEEGLKPKAEDLDACNLKRRKGSFGSIDHLQKLDEQKKWLDEEVEKVLNQRQELEELEADLKKREAIVSKKEALLQEKSHLENKKLRSSQALNTDSLKISTRLNLLEQELSEKNVQLQTSTAEEKTKISEQVEVLQKEKDQLQKRRHNVDEKLKNGRVLSPEEEHVLFQLEEGIEALEAAIEYRNESIQNRQKSLRASFHNLSRGEANVLEKLACLSPVEIRTILFRYFNKVVNLREAERKQQLYNEEMKMKVLERDNMVRELESALDHLKLQCDRRLTLQQKEHEQKMQLLLHHFKEQDGEGIMETFKTYEDKIQQLEKDLYFYKKTSRDHKKKLKELVGEAIRRQLAPSEYQEAGDGVLKPEGGGMLSEELKWASRPESMKLSGREREMDSSASSLRTQPNPQKLWEDIPELPPIHSSLAPPSGHMLGNENKTETDDNQFTKSHSRLSSQIQVVGNVGRLHGVTPVKLCRKELRQISALELSLRRSSLGVGIGSMAADSIEVSRKPRDLKT

SEQ ID NO: 9 - DNA, 861 bp, Homo sapiens; identical to SEQ ID NO: 5

SEQ ID NO: 10 - protein, 286 aa, Homo sapiens; identical to SEQ ID NO: 6

SEQ ID NO: 11 - DNA, 2861 bp, Homo sapiens
acatacccggggagggcagtagaaaggtgatcaatcttcatcaggctacatttccaatcacctaaacaaccgagcaagacaagccactccgacaaggttggctgcccggcgggtctctgtgagagatccaggtagatggtgaacggccccggcagctgagggcaggccaggcccccagacgcatcagaccctgaaggactgcgtggtgggagccctgcaccgctcctggccccgggccccctggatccgtcggggcgcctccacccagctgttagcatgatgtcttacctcaaacaacccccatacggcatgaacgggctgggcctggccgggcccgccatggacctcctgcacccatccgtgggctatccggccactccgcggaagcagcggcgggagcgcaccaccttcacgcgttcacagctggacgtgctcgaggcgctcttcgccaagactcgctaccctgacatcttcatgcgggaggaggtggcgctcaagatcaacctgccggagtctagagtccaggtctggttcaagaaccgccgcgccaaatgccgccagcagcagcagagcgggagcggaaccaagagccgcccagccaagaagaagtcctctccagtgcgggagagctcgggctccgaaagcagtggccaattcacgccgccagctgtgtccagctctgcctcgtcctctagctcggcgtccagctcttccgccaacccagcggctgcagcggctgcgggactaggtgggaacccggtggcggccgcgtcgtcgctgagtacaccagctgcctcatctatctggagcccggcctccatctcgccaggctcagcgcccgcgtccgtgtcggtgccggagccattggccgcgcctagcaacacctcgtgtatgcagcgctccgtagctgcaggcgccgccaccgcagcagcctcttatcccatgtcctacggccagggcggcagctacggccaaggctaccctacgccctcctcttcctactttggcggcgtggactgcagctcatacctagcgcccatgcactcacatcaccacccgcaccagctcagccccatggcaccctcctccatggcgggccaccatcatcaccacccacatgcgcaccacccgttgagccagtcctcaggccaccaccaccaccatcaccaccaccaccaccaaggctacggtggctctgggcttgccttcaactctgccgactgcttggattacaaggagcctggcgccgctgctgcttcctccgcctggaaactcaacttcaactcccccgactgtctggactataaggaccaagcctcatggcggttccaggtcttgtgagcccaggaatgaaagaggagaagaaacgcaactacctgcgccctccgtggtcccgatcctgttgctgctgctgcaccgcccgcctttgcctcgtcttctccaaaactgaattttcaccccccaaaaagatgtccattgcctgcactgccgcccccatttttgtgccacttgcttggggggatgtgcaaacccaccctgccccttggatggggggaccggtgcttcggcttggcctacacattctatacaggagagatgtattatttccccccttcagcccctactaaactcttaagcctccccttccagtctttctggacagctattaagcacttgcagccttcggaggctctgcgctctgatccgctgtttgagcccaacactttaatttattctttctggacactggagtcactaactggcgtgtttctgcccattggagcacccgcacactactccaaatcaaaaccactaagagttcctcccgcgcagactgctgccccttcagctgccctcgattttgctccacgcctgccggccagagcctcccggcgtttcttccgccccagcggagtgcgctggggcgcgccagggctaggcccgccggaggagcgcgtccccagccttccgcgcacagagccgcatcccgccccgccctgcgctggactggttcaagcttccgcctcggcgggaacgctgtacatagtcaggtccgttccagggaccacttaaactttttagttgctgttggttggttgaactgaacatatcttgtcttagcacccaggaaacagaactttaagatatatacagcacatatatatatatatacatatatatatacacatatataaaaaacaaaagcaaaaaatattttccctctgtccgtcccccttctgctcttcctcaatcaatggcgctttttctttttcagttgttgcaaagctgccctgccctcttcacatcttctccctctgtgtatttattgaagagaaccgcttggtttcaggaagctgggcgcgggatatccgaagtgtggaggaaacagacaagtcagggtacagaggtgggggttgggcaggggcgcagggctgaccccctcacccggtctaagcacagggtcgcagttccagtttacaaacctaaaacaagaaaaccaaaaccagggaacaaaacaacaaaacaaaacaaaatccgtaaaagtacagcattagggaaaaacaaacaaacccaggccccaaacccagttccaactcctctgtcggcttctctctttcaacacccttgttttgtctagtgagtttttagtgcaccttcgttctccgaaatctgcggagagcccgcgcgcctgtgtatcaattttggctttggccgcttcgtccagtaggtgggaaagtaatttgtaaatttgatttgtctgatgtgaagatcacaaattacttgttgaaatgtaaggcagtccccctcctcctctttatctacattacttcccgaaaataaatgcaaattaatgaacggct

SEQ ID NO: 12 - protein, 354 aa, Homo sapiens
MMSYLKQPPYGMNGLGLAGPAMDLLHPSVGYPATPRKQRRERTTFTRSQLDVLEALFAKTRYPDIFMREEVALKINLPESRVQVWFKNRRAKCRQQQQSGSGTKSRPAKKKSSPVRESSGSESSGQFTPPAVSSSASSSSSASSSSANPAAAAAAGLGGNPVAAASSLSTPAASSIWSPASISPGSAPASVSVPEPLAAPSNTSCMQRSVAAGAATAAASYPMSYGQGGSYGQGYPTPSSSYFGGVDCSSYLAPMHSHHHPHQLSPMAPSSMAGHHHHHPHAHHPLSQSSGHHHHHHHHHHQGYGGSGLAFNSADCLDYKEPGAAAASSAWKLNFNSPDCLDYKDQASWRFQVL

SEQ ID NO: 13 - DNA, 2861 bp, Homo sapiens
ggacgctgggctccaacgtttcagtagaagcgcttaagacttgcaaacacccttggtggggacctggaaccccgggagatgccgacgagcaagcaggttggctgcccggcgggtctctgtgagagatccaggtagatggtgaacggccccggcagctgagggcaggccaggcccccagacgcatcagaccctgaaggactgcgtggtgggagccctgcaccgctcctggccccgggccccctggatccgtcggggcgcctccacccagctgttagcatgatgtcttacctcaaacaacccccatacggcatgaacgggctgggcctggccgggcccgccatggacctcctgcacccatccgtgggctatccggccactccgcggaagcagcggcgggagcgcaccaccttcacgcgttcacagctggacgtgctcgaggcgctcttcgccaagactcgctaccctgacatcttcatgcgggaggaggtggcgctcaagatcaacctgccggagtctagagtccaggtctggttcaagaaccgccgcgccaaatgccgccagcagcagcagagcgggagcggaaccaagagccgcccagccaagaagaagtcctctccagtgcgggagagctcgggctccgaaagcagtggccaattcacgccgccagctgtgtccagctctgcctcgtcctctagctcggcgtccagctcttccgccaacccagcggctgcagcggctgcgggactaggtgggaacccggtggcggccgcgtcgtcgctgagtacaccagctgcctcatctatctggagcccggcctccatctcgccaggctcagcgcccgcgtccgtgtcggtgccggagccattggccgcgcctagcaacacctcgtgtatgcagcgctccgtagctgcaggcgccgccaccgcagcagcctcttatcccatgtcctacggccagggcggcagctacggccaaggctaccctacgccctcctcttcctactttggcggcgtggactgcagctcatacctagcgcccatgcactcacatcaccacccgcaccagctcagccccatggcaccctcctccatggcgggccaccatcatcaccacccacatgcgcaccacccgttgagccagtcctcaggccaccaccaccaccatcaccaccaccaccaccaaggctacggtggctctgggcttgccttcaactctgccgactgcttggattacaaggagcctggcgccgctgctgcttcctccgcctggaaactcaacttcaactcccccgactgtctggactataaggaccaagcctcatggcggttccaggtcttgtgagcccaggaatgaaagaggagaagaaacgcaactacctgcgccctccgtggtcccgatcctgttgctgctgctgcaccgcccgcctttgcctcgtcttctccaaaactgaattttcaccccccaaaaagatgtccattgcctgcactgccgcccccatttttgtgccacttgcttggggggatgtgcaaacccaccctgccccttggatggggggaccggtgcttcggcttggcctacacattctatacaggagagatgtattatttccccccttcagcccctactaaactcttaagcctccccttccagtctttctggacagctattaagcacttgcagccttcggaggctctgcgctctgatccgctgtttgagcccaacactttaatttattctttctggacactggagtcactaactggcgtgtttctgcccattggagcacccgcacactactccaaatcaaaaccactaagagttcctcccgcgcagactgctgccccttcagctgccctcgattttgctccacgcctgccggccagagcctcccggcgtttcttccgccccagcggagtgcgctggggcgcgccagggctaggcccgccggaggagcgcgtccccagccttccgcgcacagagccgcatcccgccccgccctgcgctggactggttcaagcttccgcctcggcgggaacgctgtacatagtcaggtccgttccagggaccacttaaactttttagttgctgttggttggttgaactgaacatatcttgtcttagcacccaggaaacagaactttaagatatatacagcacatatatatatatatacatatatatatacacatatataaaaaacaaaagcaaaaaatattttccctctgtccgtcccccttctgctcttcctcaatcaatggcgctttttctttttcagttgttgcaaagctgccctgccctcttcacatcttctccctctgtgtatttattgaagagaaccgcttggtttcaggaagctgggcgcgggatatccgaagtgtggaggaaacagacaagtcagggtacagaggtgggggttgggcaggggcgcagggctgaccccctcacccggtctaagcacagggtcgcagttccagtttacaaacctaaaacaagaaaaccaaaaccagggaacaaaacaacaaaacaaaacaaaatccgtaaaagtacagcattagggaaaaacaaacaaacccaggccccaaacccagttccaactcctctgtcggcttctctctttcaacacccttgttttgtctagtgagtttttagtgcaccttcgttctccgaaatctgcggagagcccgcgcgcctgtgtatcaattttggctttggccgcttcgtccagtaggtgggaaagtaatttgtaaatttgatttgtctgatgtgaagatcacaaattacttgttgaaatgtaaggcagtccccctcctcctctttatctacattacttcccgaaaataaatgcaaattaatgaacggct

SEQ ID NO: 14 - protein, 354 aa, Homo sapiens; identical to SEQ ID NO: 12

SEQ ID NO: 15 - DNA, 924 bp, Homo sapiens
atgggcacggtgctgtccctgtctcccagctaccggaaggccacgctgtttgaggatggcgcggccaccgtgggccactatacggccgtacagaacagcaagaacgccaaggacaagaacctgaagcgccactccatcatctccgtgctgccttggaagagaatcgtggccgtgtcggccaagaagaagaactccaagaaggtgcagcccaacagcagctaccagaacaacatcacgcacctcaacaatgagaacctgaagaagtcgctgtcgtgcgccaacctgtccacattcgcccagcccccaccggcccagccgcctgcacccccggccagccagctctcgggttcccagaccgggggctcctcctcagtcaagaaagcccctcaccctgccgtcacctccgcagggacgcccaaacgggtcatcgtccaggcgtccaccagtgagctgcttcgctgcctgggtgagtttctctgccgccggtgctaccgcctgaagcacctgtcccccacggaccccgtgctctggctgcgcagcgtggaccgctcgctgcttctgcagggctggcaggaccagggcttcatcacgccggccaacgtggtcttcctctacatgctctgcagggatgttatctcctccgaggtgggctcggatcacgagctccaggccgtcctgctgacatgcctgtacctctcctactcctacatgggcaacgagatctcctacccgctcaagcccttcctggtggagagctgcaaggaggccttttgggaccgttgcctctctgtcatcaacctcatgagctcaaagatgctgcagataaatgccgacccacactacttcacacaggtcttctccgacctgaagaacgagagcggccaggaggacaagaagcggctcctcctaggcctggatcggtga

SEQ ID NO: 16 - protein, 307 aa, Homo sapiens
MGTVLSLSPSYRKATLFEDGAATVGHYTAVQNSKNAKDKNLKRHSIISVLPWKRIVAVSAKKKNSKKVQPNSSYQNNITHLNNENLKKSLSCANLSTFAQPPPAQPPAPPASQLSGSQTGGSSSVKKAPHPAVTSAGTPKRVIVQASTSELLRCLGEFLCRRCYRLKHLSPTDPVLWLRSVDRSLLLQGWQDQGFITPANVVFLYMLCRDVISSEVGSDHELQAVLLTCLYLSYSYMGNEISYPLKPFLVESCKEAFWDRCLSVINLMSSKMLQINADPHYFTQVFSDLKNESGQEDKKRLLLGLDR

SEQ ID NO: 17 - DNA, 1713 bp, Homo sapiens
atggcgttccggggctggaggcccccgccgccaccgctgctcctgctgctgctctgggtgaccgggcaggcagcgcccgtggcgggcctgggctccgacgcggagctgcagatcgagcggcgcttcgtgcccgacgagtgcccgcgcaccgtgcgcagcggcgacttcgtgcgctaccactacgtggggacgttccccgacggccagaagttcgactccagctatgacagagactccactttcaatgtgtttgtgggaaaaggacagctgatcacagggatggaccaggctcttgttgggatgtgcgtaaacgagagacgtttcgtgaagattcccccaaagcttgcctacggaaatgaaggagtttctggtgtgatcccccccaattcagtgcttcattttgatgtacttctgatggatatttggaattctgaagaccaggttcagattcacacctatttcaagcccccgagttgccctcggaccatccaggtgtctgattttgtgaggtaccactacaacgggacgttcctggacggaactctgtttgattcgagtcacaatcgcatgaaaacatatgacacgtatgtgggaattggctggctgattcctggaatggataaagggctgctggggatgtgtgtgggtgagaagcgcatcatcaccattcctccttttctggcctatggagaggatggagatgggaaagacattcccggtcaggcatctctggtgtttgatgttgcattattggacctccataaccccaaggacagcatttccattgagaacaaggtagtacctgaaaactgtgagcggataagtcaaagtggggactttctcaggtatcattacaatggcacgcttctggatggcaccctctttgattccagctactctcggaaccgcacgtttgacacgtacattgggcagggctacgtgattcctgggatggatgaaggtctacttggtgtttgcattggagaaaagcgaaggattgtggtcccgcctcacctggggtatggagaggaaggaagagggaatatccccggctcggctgtgctggtgtttgacatccatgtgatcgacttccacaacccttcggactccatcagcatcacctcccactacaaaccccctgactgctcagtgctgagtaagaagggagattacctcaaatatcactacaatgcctcacttctggatgggaccctgctggactccacgtggaatttaggcaaaacttacaatattgttctgggatctgggcaagttgtgttggggatggacatgggtctcagagagatgtgcgttggcgagaaacggacagtgatcattccgcctcacctgggctatggggaagctggcgtggatggagaagtgcccggcagtgccgtattagtgtttgacattgagctgctggagctggtggctggccttcctgaggggtacatgttcatatggaatggtgaggtgtcacccaacctctttgaagaaattgacaaggatggcaacggagaagtcctcctggaagagttctcagagtacattcacgcccaggtggcatctggcaaagggaaactcgctcctggctttgatgctgagctgattgtgaagaatatgttcaccaaccaggaccggaatggagatgggaaggtcacagccgaggaatttaaactcaaagaccaggaagccaaacacgatgaactctaa

SEQ ID NO: 18 - protein, 570 aa, Homo sapiens
MAFRGWRPPPPPLLLLLLWVTGQAAPVAGLGSDAELQIERRFVPDECPRTVRSGDFVRYHYVGTFPDGQKFDSSYDRDSTFNVFVGKGQLITGMDQALVGMCVNERRFVKIPPKLAYGNEGVSGVIPPNSVLHFDVLLMDIWNSEDQVQIHTYFKPPSCPRTIQVSDFVRYHYNGTFLDGTLFDSSHNRMKTYDTYVGIGWLIPGMDKGLLGMCVGEKRIITIPPFLAYGEDGDGKDIPGQASLVFDVALLDLHNPKDSISIENKVVPENCERISQSGDFLRYHYNGTLLDGTLFDSSYSRNRTFDTYIGQGYVIPGMDEGLLGVCIGEKRRIVVPPHLGYGEEGRGNIPGSAVLVFDIHVIDFHNPSDSISITSHYKPPDCSVLSKKGDYLKYHYNASLLDGTLLDSTWNLGKTYNIVLGSGQVVLGMDMGLREMCVGEKRTVIIPPHLGYGEAGVDGEVPGSAVLVFDIELLELVAGLPEGYMFIWNGEVSPNLFEEIDKDGNGEVLLEEFSEYIHAQVASGKGKLAPGFDAELIVKNMFTNQDRNGDGKVTAEEFKLKDQEAKHDEL

SEQ ID NO: 19 - DNA, 2721 bp, Homo sapiens
atgtgccggatagcgggagcgctgcggaccctgctgccgctgctggcggccctgcttcaggcgtctgtagaggcttctggtgaaatcgcattatgcaagactggatttcctgaagatgtttacagtgcagtcttatcgaaggatgtgcatgaaggacagcctcttctcaatgtgaagtttagcaactgcaatggaaaaagaaaagtacaatatgagagcagtgagcctgcagattttaaggtggatgaagatggcatggtgtatgccgtgagaagctttccactctcttctgagcatgccaagttcctgatatatgcccaagacaaagagacccaggaaaagtggcaagtggcagtaaaattgagcctgaagccaaccttaactgaggagtcagtgaaggagtcagcagaagttgaagaaatagtgttcccaagacaattcagtaagcacagtggccacctacaaaggcagaagagagactgggtcatccctccaatcaacttgccagaaaactccaggggaccttttcctcaagagcttgtcaggatcaggtctgatagagataaaaacctttcactgcggtacagtgtaactgggccaggagctgaccagcctccaactggtatcttcattatcaaccccatctcgggtcagctgtcggtgacaaagcccctggatcgcgagcagatagcccggtttcatttgagggcacatgcagtagatattaatggaaatcaagtggagaaccccattgacattgtcatcaatgttattgacatgaatgacaacagacctgagttcttacaccaggtttggaatgggacagttcctgagggatcaaagcctggaacatatgtgatgaccgtaacagcaattgatgctgacgatcccaatgccctcaatgggatgttgaggtacagaatcgtgtctcaggctccaagcaccccttcacccaacatgtttacaatcaacaatgagactggtgacatcatcacagtggcagctggacttgatcgagaaaaagtgcaacagtatacgttaataattcaagctacagacatggaaggcaatcccacatatggcctttcaaacacagccacggccgtcatcacagtgacagatgtcaatgacaatcctccagagtttactgccatgacgttttatggtgaagttcctgagaacagggtagacatcatagtagctaatctaactgtgaccgataaggatcaaccccatacaccagcctggaacgcagtgtacagaatcagtggcggagatcctactggacggttcgccatccagaccgacccaaacagcaacgacgggttagtcaccgtggtcaaaccaatcgactttgaaacaaataggatgtttgtccttactgttgctgcagaaaatcaagtgccattagccaagggaattcagcacccccctcagtcaactgcaaccgtgtctgttacagttattgacgtaaatgaaaacccttattttgcccccaatcctaagatcattcgccaagaagaagggcttcatgccggtaccatgttgacaacattcactgctcaggacccagatcgatatatgcagcaaaatattagatacactaaattatctgatcctgccaattggctaaaaatagatcctgtgaatggacaaataactacaattgctgttttggaccgagaatcaccaaatgtgaaaaacaatatatataatgctactttccttgcttctgacaatggaattcctcctatgagtggaacaggaacgctgcagatctatttacttgatattaatgacaatgcccctcaagtgttacctcaagaggcagagacttgcgaaactccagaccccaattcaattaatattacagcacttgattatgacattgatccaaatgctggaccatttgcttttgatcttcctttatctccagtgactattaagagaaattggaccatcactcggcttaatggtgattttgctcagcttaatttaaagataaaatttcttgaagctggtatctatgaagttcccatcataatcacagattcgggtaatcctcccaaatcaaatatttccatcctgcgtgtgaaggtttgccagtgtgactccaacggggactgcacagatgtggacaggattgtgggtgcggggcttggcaccggtgccatcattgccatcctgctctgcatcatcatcctgcttatccttgtgctgatgtttgtggtatggatgaaacgccgggataaagaacgccaggccaaacaacttttaattgatccagaagatgatgtaagagataatattttaaaatatgatgaagaaggtggaggagaagaagaccaggactatgacttgagccagctgcagcagcctgacactgtggagcctgatgccatcaagcctgtgggaatccgacgaatggatgaaagacccatccacgccgagccccagtatccggtccgatctgcagccccacaccctggagacattggggacttcattaatgagggccttaaagcggctgacaatgaccccacagctccaccatatgactccctgttagtgtttgactatgaaggcagtggctccactgctgggtccttgagctcccttaattcctcaagtagtggtggtgagcaggactatgattacctgaacgactgggggccacggttcaagaaacttgctgacatgtatggtggaggtgatgactga

SEQ ID NO: 20 - protein, 906 aa, Homo sapiens
MCRIAGALRTLLPLLAALLQASVEASGEIALCKTGFPEDVYSAVLSKDVHEGQPLLNVKFSNCNGKRKVQYESSEPADFKVDEDGMVYAVRSFPLSSEHAKFLIYAQDKETQEKWQVAVKLSLKPTLTEESVKESAEVEEIVFPRQFSKHSGHLQRQKRDWVIPPINLPENSRGPFPQELVRIRSDRDKNLSLRYSVTGPGADQPPTGIFIINPISGQLSVTKPLDREQIARFHLRAHAVDINGNQVENPIDIVINVIDMNDNRPEFLHQVWNGTVPEGSKPGTYVMTVTAIDADDPNALNGMLRYRIVSQAPSTPSPNMFTINNETGDIITVAAGLDREKVQQYTLIIQATDMEGNPTYGLSNTATAVITVTDVNDNPPEFTAMTFYGEVPENRVDIIVANLTVTDKDQPHTPAWNAVYRISGGDPTGRFAIQTDPNSNDGLVTVVKPIDFETNRMFVLTVAAENQVPLAKGIQHPPQSTATVSVTVIDVNENPYFAPNPKIIRQEEGLHAGTMLTTFTAQDPDRYMQQNIRYTKLSDPANWLKIDPVNGQITTIAVLDRESPNVKNNIYNATFLASDNGIPPMSGTGTLQIYLLDINDNAPQVLPQEAETCETPDPNSINITALDYDIDPNAGPFAFDLPLSPVTIKRNWTITRLNGDFAQLNLKIKFLEAGIYEVPIIITDSGNPPKSNISILRVKVCQCDSNGDCTDVDRIVGAGLGTGAIIAILLCIIILLILVLMFVVWMKRRDKERQAKQLLIDPEDDVRDNILKYDEEGGGEEDQDYDLSQLQQPDTVEPDAIKPVGIRRMDERPIHAEPQYPVRSAAPHPGDIGDFINEGLKAADNDPTAPPYDSLLVFDYEGSGSTAGSLSSLNSSSSGGEQDYDYLNDWGPRFKKLADMYGGGDD

SEQ ID NO: 21 - DNA, 2628 bp, Homo sapiens
atgtttttattaaggcgttatgtgtgtatcttcactgagaaattaaagaaccaagcagaattgtatgttttcctttcagtgaagtttagcaactgcaatggaaaaagaaaagtacaatatgagagcagtgagcctgcagattttaaggtggatgaagatggcatggtgtatgccgtgagaagctttccactctcttctgagcatgccaagttcctgatatatgcccaagacaaagagacccaggaaaagtggcaagtggcagtaaaattgagcctgaagccaaccttaactgaggagtcagtgaaggagtcagcagaagttgaagaaatagtgttcccaagacaattcagtaagcacagtggccacctacaaaggcagaagagagactgggtcatccctccaatcaacttgccagaaaactccaggggaccttttcctcaagagcttgtcaggatcaggtctgatagagataaaaacctttcactgcggtacagtgtaactgggccaggagctgaccagcctccaactggtatcttcattatcaaccccatctcgggtcagctgtcggtgacaaagcccctggatcgcgagcagatagcccggtttcatttgagggcacatgcagtagatattaatggaaatcaagtggagaaccccattgacattgtcatcaatgttattgacatgaatgacaacagacctgagttcttacaccaggtttggaatgggacagttcctgagggatcaaagcctggaacatatgtgatgaccgtaacagcaattgatgctgacgatcccaatgccctcaatgggatgttgaggtacagaatcgtgtctcaggctccaagcaccccttcacccaacatgtttacaatcaacaatgagactggtgacatcatcacagtggcagctggacttgatcgagaaaaagtgcaacagtatacgttaataattcaagctacagacatggaaggcaatcccacatatggcctttcaaacacagccacggccgtcatcacagtgacagatgtcaatgacaatcctccagagtttactgccatgacgttttatggtgaagttcctgagaacagggtagacatcatagtagctaatctaactgtgaccgataaggatcaaccccatacaccagcctggaacgcagtgtacagaatcagtggcggagatcctactggacggttcgccatccagaccgacccaaacagcaacgacgggttagtcaccgtggtcaaaccaatcgactttgaaacaaataggatgtttgtccttactgttgctgcagaaaatcaagtgccattagccaagggaattcagcacccccctcagtcaactgcaaccgtgtctgttacagttattgacgtaaatgaaaacccttattttgcccccaatcctaagatcattcgccaagaagaagggcttcatgccggtaccatgttgacaacattcactgctcaggacccagatcgatatatgcagcaaaatattagatacactaaattatctgatcctgccaattggctaaaaatagatcctgtgaatggacaaataactacaattgctgttttggaccgagaatcaccaaatgtgaaaaacaatatatataatgctactttccttgcttctgacaatggaattcctcctatgagtggaacaggaacgctgcagatctatttacttgatattaatgacaatgcccctcaagtgttacctcaagaggcagagacttgcgaaactccagaccccaattcaattaatattacagcacttgattatgacattgatccaaatgctggaccatttgcttttgatcttcctttatctccagtgactattaagagaaattggaccatcactcggcttaatggtgattttgctcagcttaatttaaagataaaatttcttgaagctggtatctatgaagttcccatcataatcacagattcgggtaatcctcccaaatcaaatatttccatcctgcgtgtgaaggtttgccagtgtgactccaacggggactgcacagatgtggacaggattgtgggtgcggggcttggcaccggtgccatcattgccatcctgctctgcatcatcatcctgcttatccttgtgctgatgtttgtggtatggatgaaacgccgggataaagaacgccaggccaaacaacttttaattgatccagaagatgatgtaagagataatattttaaaatatgatgaagaaggtggaggagaagaagaccaggactatgacttgagccagctgcagcagcctgacactgtggagcctgatgccatcaagcctgtgggaatccgacgaatggatgaaagacccatccacgccgagccccagtatccggtccgatctgcagccccacaccctggagacattggggacttcattaatgagggccttaaagcggctgacaatgaccccacagctccaccatatgactccctgttagtgtttgactatgaaggcagtggctccactgctgggtccttgagctcccttaattcctcaagtagtggtggtgagcaggactatgattacctgaacgactgggggccacggttcaagaaacttgctgacatgtatggtggaggtgatgactga

SEQ ID NO: 22 - protein, 875 aa, Homo sapiens
MFLLRRYVCIFTEKLKNQAELYVFLSVKFSNCNGKRKVQYESSEPADFKVDEDGMVYAVRSFPLSSEHAKFLIYAQDKETQEKWQVAVKLSLKPTLTEESVKESAEVEEIVFPRQFSKHSGHLQRQKRDWVIPPINLPENSRGPFPQELVRIRSDRDKNLSLRYSVTGPGADQPPTGIFIINPISGQLSVTKPLDREQIARFHLRAHAVDINGNQVENPIDIVINVIDMNDNRPEFLHQVWNGTVPEGSKPGTYVMTVTAIDADDPNALNGMLRYRIVSQAPSTPSPNMFTINNETGDIITVAAGLDREKVQQYTLIIQATDMEGNPTYGLSNTATAVITVTDVNDNPPEFTAMTFYGEVPENRVDIIVANLTVTDKDQPHTPAWNAVYRISGGDPTGRFAIQTDPNSNDGLVTVVKPIDFETNRMFVLTVAAENQVPLAKGIQHPPQSTATVSVTVIDVNENPYFAPNPKIIRQEEGLHAGTMLTTFTAQDPDRYMQQNIRYTKLSDPANWLKIDPVNGQITTIAVLDRESPNVKNNIYNATFLASDNGIPPMSGTGTLQIYLLDINDNAPQVLPQEAETCETPDPNSINITALDYDIDPNAGPFAFDLPLSPVTIKRNWTITRLNGDFAQLNLKIKFLEAGIYEVPIIITDSGNPPKSNISILRVKVCQCDSNGDCTDVDRIVGAGLGTGAIIAILLCIIILLILVLMFVVWMKRRDKERQAKQLLIDPEDDVRDNILKYDEEGGGEEDQDYDLSQLQQPDTVEPDAIKPVGIRRMDERPIHAEPQYPVRSAAPHPGDIGDFINEGLKAADNDPTAPPYDSLLVFDYEGSGSTAGSLSSLNSSSSGGEQDYDYLNDWGPRFKKLADMYGGGDD

SEQ ID NO: 23 - DNA, 2757 bp, Homo sapiens
atgccagggggcgcaggcgccgcccggctctgcttgctggcgtttgccctgcagcccctccggccgcgggcggcgcgggagcctggatggacaagaggaagtgaggaaggcagccccaagctgcagcatgaacttatcatacctcagtggaagacttcagaaagccccgtgagagaaaagcatccactcaaagctgagctcagggtaatggctgaggggcgagaactgatcctggacctggagaagaatgagcaactttttgctccttcctacacagaaacccattatacttcaagtggtaaccctcaaaccaccacacggaaattggaggatcactgcttttaccacggcacggtgagggagacagaactgtccagcgtcacgctcagcacttgccgaggaattagaggactgattacggtgagcagcaacctcagctacgtcatcgagcccctccctgacagcaagggccaacaccttatttacagatctgaacatctcaagccgcccccgggaaactgtgggttcgagcactccaagcccaccaccagggactgggctcttcagtttacacaacagaccaagaagcgacctcgcaggatgaaaagggaagatttaaactccatgaagtatgtggagctttacctcgtggctgattatttagagtttcagaagaatcgacgagaccaggacgccaccaaacacaagctcatagagatcgccaactatgttgataagttttaccgatccttgaacatccggattgctctcgtgggcttggaagtgtggacccacgggaacatgtgtgaagtttcagagaatccatattctaccctctggtcctttctcagttggaggcgcaagctgcttgcccagaagtaccatgacaacgcccaattaatcacgggcatgtccttccacggcaccaccatcggcctggcccccctcatggccatgtgctctgtgtaccagtctggaggagtcaacatggaccactccgagaatgccattggcgtggctgccaccatggcccacgagatgggccacaactttggcatgacccatgattctgcagattgctgctcggccagtgcggctgatggtgggtgcatcatggcagctgccactgggcacccctttcccaaagtgttcaatggatgcaacaggagggagctggacaggtatctgcagtcaggtggtggaatgtgtctctccaacatgccagacaccaggatgttgtatggaggccggaggtgtgggaacgggtatctggaagatggggaagagtgtgactgtggagaagaagaggaatgtaacaacccctgctgcaatgcctctaattgtaccctgaggccgggggcggagtgtgctcacggctcctgctgccaccagtgtaagctgttggctcctgggaccctgtgccgcgagcaggccaggcagtgtgacctcccggagttctgtacgggcaagtctccccactgccctaccaacttctaccagatggatggtaccccctgtgagggcggccaggcctactgctacaacggcatgtgcctcacctaccaggagcagtgccagcagctgtggggacccggagcccgacctgcccctgacctctgcttcgagaaggtgaatgtggcaggagacacctttggaaactgtggaaaggacatgaatggtgaacacaggaagtgcaacatgagagatgcgaagtgtgggaagatccagtgtcagagctctgaggcccggcccctggagtccaacgcggtgcccattgacaccactatcatcatgaatgggaggcagatccagtgccggggcacccacgtctaccgaggtcctgaggaggagggtgacatgctggacccagggctggtgatgactggaaccaagtgtggctacaaccatatttgctttgaggggcagtgcaggaacacctccttctttgaaactgaaggctgtgggaagaagtgcaatggccatggggtctgtaacaacaaccagaactgccactgcctgccgggctgggccccgcccttctgcaacacaccgggccacgggggcagtatcgacagtgggcctatgccccctgagagtgtgggtcctgtggtagctggagtgttggtggccatcttggtgctggcggtcctcatgctgatgtactactgctgcagacagaacaacaaactaggccaactcaagccctcagctctcccttccaagctgaggcaacagttcagttgtcccttcagggtttctcagaacagcgggactggtcatgccaacccaactttcaagctgcagacgccccagggcaagcgaaaggtgatcaacactccggaaatcctgcggaagccctcccagcctcctccccggccccctccagattatctgcgtggtgggtccccacctgcaccactgccagctcacctgagcagggctgctaggaactccccagggcccgggtctcaaatagagaggacggagtcgtccaggaggcctcctccaagccggccaattccccccgcaccaaattgcatcgtttcccaggacttctccaggcctcggccgccccagaaggcactcccggcaaacccagtgccaggccgcaggagcctccccaggccaggaggtgcatccccactgcggccccctggtgctggccctcagcagtcccggcctctggcagcacttgccccaaagtttccagaatacagatcacagagggctggagggatgattagctcgaaaatctag

SEQ ID NO: 24 - protein, 918 aa, Homo sapiens
MPGGAGAARLCLLAFALQPLRPRAAREPGWTRGSEEGSPKLQHELIIPQWKTSESPVREKHPLKAELRVMAEGRELILDLEKNEQLFAPSYTETHYTSSGNPQTTTRKLEDHCFYHGTVRETELSSVTLSTCRGIRGLITVSSNLSYVIEPLPDSKGQHLIYRSEHLKPPPGNCGFEHSKPTTRDWALQFTQQTKKRPRRMKREDLNSMKYVELYLVADYLEFQKNRRDQDATKHKLIEIANYVDKFYRSLNIRIALVGLEVWTHGNMCEVSENPYSTLWSFLSWRRKLLAQKYHDNAQLITGMSFHGTTIGLAPLMAMCSVYQSGGVNMDHSENAIGVAATMAHEMGHNFGMTHDSADCCSASAADGGCIMAAATGHPFPKVFNGCNRRELDRYLQSGGGMCLSNMPDTRMLYGGRRCGNGYLEDGEECDCGEEEECNNPCCNASNCTLRPGAECAHGSCCHQCKLLAPGTLCREQARQCDLPEFCTGKSPHCPTNFYQMDGTPCEGGQAYCYNGMCLTYQEQCQQLWGPGARPAPDLCFEKVNVAGDTFGNCGKDMNGEHRKCNMRDAKCGKIQCQSSEARPLESNAVPIDTTIIMNGRQIQCRGTHVYRGPEEEGDMLDPGLVMTGTKCGYNHICFEGQCRNTSFFETEGCGKKCNGHGVCNNNQNCHCLPGWAPPFCNTPGHGGSIDSGPMPPESVGPVVAGVLVAILVLAVLMLMYYCCRQNNKLGQLKPSALPSKLRQQFSCPFRVSQNSGTGHANPTFKLQTPQGKRKVINTPEILRKPSQPPPRPPPDYLRGGSPPAPLPAHLSRAARNSPGPGSQIERTESSRRPPPSRPIPPAPNCIVSQDFSRPRPPQKALPANPVPGRRSLPRPGGASPLRPPGAGPQQSRPLAALAPKFPEYRSQRAGGMISSKI

SEQ ID NO: 25 - DNA, 2763 bp, Homo sapiens
atgccagggggcgcaggcgccgcccggctctgcttgctggcgtttgccctgcagcccctccggccgcgggcggcgcgggagcctggatggacaatctctagaggaagtgaggaaggcagccccaagctgcagcatgaacttatcatacctcagtggaagacttcagaaagccccgtgagagaaaagcatccactcaaagctgagctcagggtaatggctgaggggcgagaactgatcctggacctggagaagaatgagcaactttttgctccttcctacacagaaacccattatacttcaagtggtaaccctcaaaccaccacacggaaattggaggatcactgcttttaccacggcacggtgagggagacagaactgtccagcgtcacgctcagcacttgccgaggaattagaggactgattacggtgagcagcaacctcagctacgtcatcgagcccctccctgacagcaagggccaacaccttatttacagatctgaacatctcaagccgcccccgggaaactgtgggttcgagcactccaagcccaccaccagggactgggctcttcagtttacacaacagaccaagaagcgacctcgcaggatgaaaagggaagatttaaactccatgaagtatgtggagctttacctcgtggctgattatttagagtttcagaagaatcgacgagaccaggacgccaccaaacacaagctcatagagatcgccaactatgttgataagttttaccgatccttgaacatccggattgctctcgtgggcttggaagtgtggacccacgggaacatgtgtgaagtttcagagaatccatattctaccctctggtcctttctcagttggaggcgcaagctgcttgcccagaagtaccatgacaacgcccaattaatcacgggcatgtccttccacggcaccaccatcggcctggcccccctcatggccatgtgctctgtgtaccagtctggaggagtcaacatggaccactccgagaatgccattggcgtggctgccaccatggcccacgagatgggccacaactttggcatgacccatgattctgcagattgctgctcggccagtgcggctgatggtgggtgcatcatggcagctgccactgggcacccctttcccaaagtgttcaatggatgcaacaggagggagctggacaggtatctgcagtcaggtggtggaatgtgtctctccaacatgccagacaccaggatgttgtatggaggccggaggtgtgggaacgggtatctggaagatggggaagagtgtgactgtggagaagaagaggaatgtaacaacccctgctgcaatgcctctaattgtaccctgaggccgggggcggagtgtgctcacggctcctgctgccaccagtgtaagctgttggctcctgggaccctgtgccgcgagcaggccaggcagtgtgacctcccggagttctgtacgggcaagtctccccactgccctaccaacttctaccagatggatggtaccccctgtgagggcggccaggcctactgctacaacggcatgtgcctcacctaccaggagcagtgccagcagctgtggggacccggagcccgacctgcccctgacctctgcttcgagaaggtgaatgtggcaggagacacctttggaaactgtggaaaggacatgaatggtgaacacaggaagtgcaacatgagagatgcgaagtgtgggaagatccagtgtcagagctctgaggcccggcccctggagtccaacgcggtgcccattgacaccactatcatcatgaatgggaggcagatccagtgccggggcacccacgtctaccgaggtcctgaggaggagggtgacatgctggacccagggctggtgatgactggaaccaagtgtggctacaaccatatttgctttgaggggcagtgcaggaacacctccttctttgaaactgaaggctgtgggaagaagtgcaatggccatggggtctgtaacaacaaccagaactgccactgcctgccgggctgggccccgcccttctgcaacacaccgggccacgggggcagtatcgacagtgggcctatgccccctgagagtgtgggtcctgtggtagctggagtgttggtggccatcttggtgctggcggtcctcatgctgatgtactactgctgcagacagaacaacaaactaggccaactcaagccctcagctctcccttccaagctgaggcaacagttcagttgtcccttcagggtttctcagaacagcgggactggtcatgccaacccaactttcaagctgcagacgccccagggcaagcgaaaggtgatcaacactccggaaatcctgcggaagccctcccagcctcctccccggccccctccagattatctgcgtggtgggtccccacctgcaccactgccagctcacctgagcagggctgctaggaactccccagggcccgggtctcaaatagagaggacggagtcgtccaggaggcctcctccaagccggccaattccccccgcaccaaattgcatcgtttcccaggacttctccaggcctcggccgccccagaaggcactcccggcaaacccagtgccaggccgcaggagcctccccaggccaggaggtgcatccccactgcggccccctggtgctggccctcagcagtcccggcctctggcagcacttgccccaaagtttccagaatacagatcacagagggctggagggatgattagctcgaaaatctag

SEQ ID NO: 26 - protein, 920 aa, Homo sapiens
MPGGAGAARLCLLAFALQPLRPRAAREPGWTISRGSEEGSPKLQHELIIPQWKTSESPVREKHPLKAELRVMAEGRELILDLEKNEQLFAPSYTETHYTSSGNPQTTTRKLEDHCFYHGTVRETELSSVTLSTCRGIRGLITVSSNLSYVIEPLPDSKGQHLIYRSEHLKPPPGNCGFEHSKPTTRDWALQFTQQTKKRPRRMKREDLNSMKYVELYLVADYLEFQKNRRDQDATKHKLIEIANYVDKFYRSLNIRIALVGLEVWTHGNMCEVSENPYSTLWSFLSWRRKLLAQKYHDNAQLITGMSFHGTTIGLAPLMAMCSVYQSGGVNMDHSENAIGVAATMAHEMGHNFGMTHDSADCCSASAADGGCIMAAATGHPFPKVFNGCNRRELDRYLQSGGGMCLSNMPDTRMLYGGRRCGNGYLEDGEECDCGEEEECNNPCCNASNCTLRPGAECAHGSCCHQCKLLAPGTLCREQARQCDLPEFCTGKSPHCPTNFYQMDGTPCEGGQAYCYNGMCLTYQEQCQQLWGPGARPAPDLCFEKVNVAGDTFGNCGKDMNGEHRKCNMRDAKCGKIQCQSSEARPLESNAVPIDTTIIMNGRQIQCRGTHVYRGPEEEGDMLDPGLVMTGTKCGYNHICFEGQCRNTSFFETEGCGKKCNGHGVCNNNQNCHCLPGWAPPFCNTPGHGGSIDSGPMPPESVGPVVAGVLVAILVLAVLMLMYYCCRQNNKLGQLKPSALPSKLRQQFSCPFRVSQNSGTGHANPTFKLQTPQGKRKVINTPEILRKPSQPPPRPPPDYLRGGSPPAPLPAHLSRAARNSPGPGSQIERTESSRRPPPSRPIPPAPNCIVSQDFSRPRPPQKALPANPVPGRRSLPRPGGASPLRPPGAGPQQSRPLAALAPKFPEYRSQRAGGMISSKI

SEQ ID NO: 27 - DNA, 2874 bp, Homo sapiens
atgccagggggcgcaggcgccgcccggctctgcttgctggcgtttgccctgcagcccctccggccgcgggcggcgcgggagcctggatggacaatctctagaggaagtgaggaaggcagccccaagctgcagcatgaacttatcatacctcagtggaagacttcagaaagccccgtgagagaaaagcatccactcaaagctgagctcagggtaatggctgaggggcgagaactgatcctggacctggagaagaatgagcaactttttgctccttcctacacagaaacccattatacttcaagtggtaaccctcaaaccaccacacggaaattggaggatcactgcttttaccacggcacggtgagggagacagaactgtccagcgtcacgctcagcacttgccgaggaattagaggactgattacggtgagcagcaacctcagctacgtcatcgagcccctccctgacagcaagggccaacaccttatttacagatctgaacatctcaagccgcccccgggaaactgtgggttcgagcactccaagcccaccaccagggactgggctcttcagtttacacaacagaccaagaagcgacctcgcaggatgaaaagggaagatttaaactccatgaagtatgtggagctttacctcgtggctgattatttagagtttcagaagaatcgacgagaccaggacgccaccaaacacaagctcatagagatcgccaactatgttgataagttttaccgatccttgaacatccggattgctctcgtgggcttggaagtgtggacccacgggaacatgtgtgaagtttcagagaatccatattctaccctctggtcctttctcagttggaggcgcaagctgcttgcccagaagtaccatgacaacgcccaattaatcacgggcatgtccttccacggcaccaccatcggcctggcccccctcatggccatgtgctctgtgtaccagtctggaggagtcaacatggaccactccgagaatgccattggcgtggctgccaccatggcccacgagatgggccacaactttggcatgacccatgattctgcagattgctgctcggccagtgcggctgatggtgggtgcatcatggcagctgccactgggcacccctttcccaaagtgttcaatggatgcaacaggagggagctggacaggtatctgcagtcaggtggtggaatgtgtctctccaacatgccagacaccaggatgttgtatggaggccggaggtgtgggaacgggtatctggaagatggggaagagtgtgactgtggagaagaagaggaatgtaacaacccctgctgcaatgcctctaattgtaccctgaggccgggggcggagtgtgctcacggctcctgctgccaccagtgtaagctgttggctcctgggaccctgtgccgcgagcaggccaggcagtgtgacctcccggagttctgtacgggcaagtctccccactgccctaccaacttctaccagatggatggtaccccctgtgagggcggccaggcctactgctacaacggcatgtgcctcacctaccaggagcagtgccagcagctgtggggacccggagcccgacctgcccctgacctctgcttcgagaaggtgaatgtggcaggagacacctttggaaactgtggaaaggacatgaatggtgaacacaggaagtgcaacatgagagatgcgaagtgtgggaagatccagtgtcagagctctgaggcccggcccctggagtccaacgcggtgcccattgacaccactatcatcatgaatgggaggcagatccagtgccggggcacccacgtctaccgaggtcctgaggaggagggtgacatgctggacccagggctggtgatgactggaaccaagtgtggctacaaccatatttgctttgaggggcagtgcaggaacacctccttctttgaaactgaaggctgtgggaagaagtgcaatggccatggggtctgtaacaacaaccagaactgccactgcctgccgggctgggccccgcccttctgcaacacaccgggccacgggggcagtatcgacagtgggcctatgccccctgagagtgtgggtcctgtggtagctggagtgttggtggccatcttggtgctggcggtcctcatgctgatgtactactgctgcagacagaacaacaaactaggccaactcaagccctcagctctcccttccaagctgaggcaacagttcagttgtcccttcagggtttctcagaacagcgggactggtcatgccaacccaactttcaagctgcagacgccccagggcaagcgaaaggtgatcaacactccggaaatcctgcggaagccctcccagcctcctccccggccccctccagattatctgcgtggtgggtccccacctgcaccactgccagctcacctgagcagggctgctaggaactccccagggcccgggtctcaaatagagaggacggagtcgtccaggaggcctcctccaagccggccaattccccccgcaccaaattgcatcgtttcccaggacttctccaggcctcggccgccccagaaggcactcccggcaaacccagtgccaggccgcaggagcctccccaggccaggaggtgcatccccactgcggccccctggtgctggccctcagcagtcccggcctctggcagcacttgccccaaaggtgagtccacgggaagccctcaaggtgaaagctggtaccagagggctccaggggggcaggtgtagagttgagaaaacaaagcaattcatgcttcttgtggtctggactgaacttccagaacaaaagccaagggcaaaacattcatgtttcttggtgcccgcttga

SEQ ID NO: 28 - protein, 957 aa, Homo sapiens
MPGGAGAARLCLLAFALQPLRPRAAREPGWTISRGSEEGSPKLQHELIIPQWKTSESPVREKHPLKAELRVMAEGRELILDLEKNEQLFAPSYTETHYTSSGNPQTTTRKLEDHCFYHGTVRETELSSVTLSTCRGIRGLITVSSNLSYVIEPLPDSKGQHLIYRSEHLKPPPGNCGFEHSKPTTRDWALQFTQQTKKRPRRMKREDLNSMKYVELYLVADYLEFQKNRRDQDATKHKLIEIANYVDKFYRSLNIRIALVGLEVWTHGNMCEVSENPYSTLWSFLSWRRKLLAQKYHDNAQLITGMSFHGTTIGLAPLMAMCSVYQSGGVNMDHSENAIGVAATMAHEMGHNFGMTHDSADCCSASAADGGCIMAAATGHPFPKVFNGCNRRELDRYLQSGGGMCLSNMPDTRMLYGGRRCGNGYLEDGEECDCGEEEECNNPCCNASNCTLRPGAECAHGSCCHQCKLLAPGTLCREQARQCDLPEFCTGKSPHCPTNFYQMDGTPCEGGQAYCYNGMCLTYQEQCQQLWGPGARPAPDLCFEKVNVAGDTFGNCGKDMNGEHRKCNMRDAKCGKIQCQSSEARPLESNAVPIDTTIIMNGRQIQCRGTHVYRGPEEEGDMLDPGLVMTGTKCGYNHICFEGQCRNTSFFETEGCGKKCNGHGVCNNNQNCHCLPGWAPPFCNTPGHGGSIDSGPMPPESVGPVVAGVLVAILVLAVLMLMYYCCRQNNKLGQLKPSALPSKLRQQFSCPFRVSQNSGTGHANPTFKLQTPQGKRKVINTPEILRKPSQPPPRPPPDYLRGGSPPAPLPAHLSRAARNSPGPGSQIERTESSRRPPPSRPIPPAPNCIVSQDFSRPRPPQKALPANPVPGRRSLPRPGGASPLRPPGAGPQQSRPLAALAPKVSPREALKVKAGTRGLQGGRCRVEKTKQFMLLVVWTELPEQKPRAKHSCFLVPA

SEQ ID NO: 29 - DNA, 2871 bp, Homo sapiens
atgccagggggcgcaggcgccgcccggctctgcttgctggcgtttgccctgcagcccctccggccgcgggcggcgcgggagcctggatggacaagtaaaggaagtgaggaaggcagccccaagctgcagcatgaacttatcatacctcagtggaagacttcagaaagccccgtgagagaaaagcatccactcaaagctgagctcagggtaatggctgaggggcgagaactgatcctggacctggagaagaatgagcaactttttgctccttcctacacagaaacccattatacttcaagtggtaaccctcaaaccaccacacggaaattggaggatcactgcttttaccacggcacggtgagggagacagaactgtccagcgtcacgctcagcacttgccgaggaattagaggactgattacggtgagcagcaacctcagctacgtcatcgagcccctccctgacagcaagggccaacaccttatttacagatctgaacatctcaagccgcccccgggaaactgtgggttcgagcactccaagcccaccaccagggactgggctcttcagtttacacaacagaccaagaagcgacctcgcaggatgaaaagggaagatttaaactccatgaagtatgtggagctttacctcgtggctgattatttagagtttcagaagaatcgacgagaccaggacgccaccaaacacaagctcatagagatcgccaactatgttgataagttttaccgatccttgaacatccggattgctctcgtgggcttggaagtgtggacccacgggaacatgtgtgaagtttcagagaatccatattctaccctctggtcctttctcagttggaggcgcaagctgcttgcccagaagtaccatgacaacgcccaattaatcacgggcatgtccttccacggcaccaccatcggcctggcccccctcatggccatgtgctctgtgtaccagtctggaggagtcaacatggaccactccgagaatgccattggcgtggctgccaccatggcccacgagatgggccacaactttggcatgacccatgattctgcagattgctgctcggccagtgcggctgatggtgggtgcatcatggcagctgccactgggcacccctttcccaaagtgttcaatggatgcaacaggagggagctggacaggtatctgcagtcaggtggtggaatgtgtctctccaacatgccagacaccaggatgttgtatggaggccggaggtgtgggaacgggtatctggaagatggggaagagtgtgactgtggagaagaagaggaatgtaacaacccctgctgcaatgcctctaattgtaccctgaggccgggggcggagtgtgctcacggctcctgctgccaccagtgtaagctgttggctcctgggaccctgtgccgcgagcaggccaggcagtgtgacctcccggagttctgtacgggcaagtctccccactgccctaccaacttctaccagatggatggtaccccctgtgagggcggccaggcctactgctacaacggcatgtgcctcacctaccaggagcagtgccagcagctgtggggacccggagcccgacctgcccctgacctctgcttcgagaaggtgaatgtggcaggagacacctttggaaactgtggaaaggacatgaatggtgaacacaggaagtgcaacatgagagatgcgaagtgtgggaagatccagtgtcagagctctgaggcccggcccctggagtccaacgcggtgcccattgacaccactatcatcatgaatgggaggcagatccagtgccggggcacccacgtctaccgaggtcctgaggaggagggtgacatgctggacccagggctggtgatgactggaaccaagtgtggctacaaccatatttgctttgaggggcagtgcaggaacacctccttctttgaaactgaaggctgtgggaagaagtgcaatggccatggggtctgtaacaacaaccagaactgccactgcctgccgggctgggccccgcccttctgcaacacaccgggccacgggggcagtatcgacagtgggcctatgccccctgagagtgtgggtcctgtggtagctggagtgttggtggccatcttggtgctggcggtcctcatgctgatgtactactgctgcagacagaacaacaaactaggccaactcaagccctcagctctcccttccaagctgaggcaacagttcagttgtcccttcagggtttctcagaacagcgggactggtcatgccaacccaactttcaagctgcagacgccccagggcaagcgaaaggtgatcaacactccggaaatcctgcggaagccctcccagcctcctccccggccccctccagattatctgcgtggtgggtccccacctgcaccactgccagctcacctgagcagggctgctaggaactccccagggcccgggtctcaaatagagaggacggagtcgtccaggaggcctcctccaagccggccaattccccccgcaccaaattgcatcgtttcccaggacttctccaggcctcggccgccccagaaggcactcccggcaaacccagtgccaggccgcaggagcctccccaggccaggaggtgcatccccactgcggccccctggtgctggccctcagcagtcccggcctctggcagcacttgccccaaaggtgagtccacgggaagccctcaaggtgaaagctggtaccagagggctccaggggggcaggtgtagagttgagaaaacaaagcaattcatgcttcttgtggtctggactgaacttccagaacaaaagccaagggcaaaacattcatgtttcttggtgcccgcttga

SEQ ID NO: 30 - protein, 956 aa, Homo sapiens
MPGGAGAARLCLLAFALQPLRPRAAREPGWTSKGSEEGSPKLQHELIIPQWKTSESPVREKHPLKAELRVMAEGRELILDLEKNEQLFAPSYTETHYTSSGNPQTTTRKLEDHCFYHGTVRETELSSVTLSTCRGIRGLITVSSNLSYVIEPLPDSKGQHLIYRSEHLKPPPGNCGFEHSKPTTRDWALQFTQQTKKRPRRMKREDLNSMKYVELYLVADYLEFQKNRRDQDATKHKLIEIANYVDKFYRSLNIRIALVGLEVWTHGNMCEVSENPYSTLWSFLSWRRKLLAQKYHDNAQLITGMSFHGTTIGLAPLMAMCSVYQSGGVNMDHSENAIGVAATMAHEMGHNFGMTHDSADCCSASAADGGCIMAAATGHPFPKVFNGCNRRELDRYLQSGGGMCLSNMPDTRMLYGGRRCGNGYLEDGEECDCGEEEECNNPCCNASNCTLRPGAECAHGSCCHQCKLLAPGTLCREQARQCDLPEFCTGKSPHCPTNFYQMDGTPCEGGQAYCYNGMCLTYQEQCQQLWGPGARPAPDLCFEKVNVAGDTFGNCGKDMNGEHRKCNMRDAKCGKIQCQSSEARPLESNAVPIDTTIIMNGRQIQCRGTHVYRGPEEEGDMLDPGLVMTGTKCGYNHICFEGQCRNTSFFETEGCGKKCNGHGVCNNNQNCHCLPGWAPPFCNTPGHGGSIDSGPMPPESVGPVVAGVLVAILVLAVLMLMYYCCRQNNKLGQLKPSALPSKLRQQFSCPFRVSQNSGTGHANPTFKLQTPQGKRKVINTPEILRKPSQPPPRPPPDYLRGGSPPAPLPAHLSRAARNSPGPGSQIERTESSRRPPPSRPIPPAPNCIVSQDFSRPRPPQKALPANPVPGRRSLPRPGGASPLRPPGAGPQQSRPLAALAPKVSPREALKVKAGTRGLQGGRCRVEKTKQFMLLVVWTELPEQKPRAKHSCFLVPA

SEQ ID NO: 31 - DNA, 1044 bp, Homo sapiens
atggctctcatgctcagtttggttctgagtctcctcaagctgggatcagggcagtggcaggtgtttgggccagacaagcctgtccaggccttggtgggggaggacgcagcattctcctgtttcctgtctcctaagaccaatgcagaggccatggaagtgcggttcttcaggggccagttctctagcgtggtccacctctacagggacgggaaggaccagccatttatgcagatgccacagtatcaaggcaggacaaaactggtgaaggattctattgcggaggggcgcatctctctgaggctggaaaacattactgtgttggatgctggcctctatgggtgcaggattagttcccagtcttactaccagaaggccatctgggagctacaggtgtcagcactgggctcagttcctctcatttccatcacgggatatgttgatagagacatccagctactctgtcagtcctcgggctggttcccccggcccacagcgaagtggaaaggtccacaaggacaggatttgtccacagactccaggacaaacagagacatgcatggcctgtttgatgtggagatctctctgaccgtccaagagaacgccgggagcatatcctgttccatgcggcatgctcatctgagccgagaggtggaatccagggtacagataggagatacctttttcgagcctatatcgtggcacctggctaccaaagtactgggaatactctgctgtggcctattttttggcattgttggactgaagattttcttctccaaattccagtgtaagcgagagagagaagcatgggccggtgccttattcatggttccagcagggacaggatcagagatgctcccacatccagctgcttctcttcttctagtcctagcctccaggggcccaggcccaaaaaaggaaaatccaggcggaactggactggagaagaaagcacggacaggcagaattgagagacgcccggaaacacgcagtggaggtgactctggatccagagacggctcacccgaagctctgcgtttctga

SEQ ID NO: 32 - protein, 347 aa, Homo sapiens
MALMLSLVLSLLKLGSGQWQVFGPDKPVQALVGEDAAFSCFLSPKTNAEAMEVRFFRGQFSSVVHLYRDGKDQPFMQMPQYQGRTKLVKDSIAEGRISLRLENITVLDAGLYGCRISSQSYYQKAIWELQVSALGSVPLISITGYVDRDIQLLCQSSGWFPRPTAKWKGPQGQDLSTDSRTNRDMHGLFDVEISLTVQENAGSISCSMRHAHLSREVESRVQIGDTFFEPISWHLATKVLGILCCGLFFGIVGLKIFFSKFQCKREREAWAGALFMVPAGTGSEMLPHPAASLLLVLASRGPGPKKENPGGTGLEKKARTGRIERRPETRSGGDSGSRDGSPEALRF

SEQ ID NO: 33 - DNA, 1503 bp, Homo sapiens
atggctctcatgctcagtttggttctgagtctcctcaagctgggatcagggcagtggcaggtgtttgggccagacaagcctgtccaggccttggtgggggaggacgcagcattctcctgtttcctgtctcctaagaccaatgcagaggccatggaagtgcggttcttcaggggccagttctctagcgtggtccacctctacagggacgggaaggaccagccatttatgcagatgccacagtatcaaggcaggacaaaactggtgaaggattctattgcggaggggcgcatctctctgaggctggaaaacattactgtgttggatgctggcctctatgggtgcaggattagttcccagtcttactaccagaaggccatctgggagctacaggtgtcagcactgggctcagttcctctcatttccatcacgggatatgttgatagagacatccagctactctgtcagtcctcgggctggttcccccggcccacagcgaagtggaaaggtccacaaggacaggatttgtccacagactccaggacaaacagagacatgcatggcctgtttgatgtggagatctctctgaccgtccaagagaacgccgggagcatatcctgttccatgcggcatgctcatctgagccgagaggtggaatccagggtacagataggagatacctttttcgagcctatatcgtggcacctggctaccaaagtactgggaatactctgctgtggcctattttttggcattgttggactgaagattttcttctccaaattccagtggaaaatccaggcggaactggactggagaagaaagcacggacaggcagaattgagagacgcccggaaacacgcagtggaggtgactctggatccagagacggctcacccgaagctctgcgtttctgatctgaaaactgtaacccatagaaaagctccccaggaggtgcctcactctgagaagagatttacaaggaagagtgtggtggcttctcagagtttccaagcagggaaacattactgggaggtggacggaggacacaataaaaggtggcgcgtgggagtgtgccgggatgatgtggacaggaggaaggagtacgtgactttgtctcccgatcatgggtactgggtcctcagactgaatggagaacatttgtatttcacattaaatccccgttttatcagcgtcttccccaggaccccacctacaaaaataggggtcttcctggactatgagtgtgggaccatctccttcttcaacataaatgaccagtcccttatttataccctgacatgtcggtttgaaggcttattgaggccctacattgagtatccgtcctataatgagcaaaatggaactcccatagtcatctgcccagtcacccaggaatcagagaaagaggcctcttggcaaagggcctctgcaatcccagagacaagcaacagtgagtcctcctcacaggcaaccacgcccttcctccccaggggtgaaatgtag

SEQ ID NO: 34 - protein, 500 aa, Homo sapiens
MALMLSLVLSLLKLGSGQWQVFGPDKPVQALVGEDAAFSCFLSPKTNAEAMEVRFFRGQFSSVVHLYRDGKDQPFMQMPQYQGRTKLVKDSIAEGRISLRLENITVLDAGLYGCRISSQSYYQKAIWELQVSALGSVPLISITGYVDRDIQLLCQSSGWFPRPTAKWKGPQGQDLSTDSRTNRDMHGLFDVEISLTVQENAGSISCSMRHAHLSREVESRVQIGDTFFEPISWHLATKVLGILCCGLFFGIVGLKIFFSKFQWKIQAELDWRRKHGQAELRDARKHAVEVTLDPETAHPKLCVSDLKTVTHRKAPQEVPHSEKRFTRKSVVASQSFQAGKHYWEVDGGHNKRWRVGVCRDDVDRRKEYVTLSPDHGYWVLRLNGEHLYFTLNPRFISVFPRTPPTKIGVFLDYECGTISFFNINDQSLIYTLTCRFEGLLRPYIEYPSYNEQNGTPIVICPVTQESEKEASWQRASAIPETSNSESSSQATTPFLPRGEM

SEQ ID NO: 35 - DNA, 1401 bp, Homo sapiens
atggcttttgtgctcattttggttctcagtttctacgagctggtgtcaggacagtggcaagtcactggaccgggcaagtttgtccaggccttggtgggggaggacgccgtgttctcctgctccctctttcctgagaccagtgcagaggctatggaagtgcggttcttcaggaatcagttccatgctgtggtccacctctacagagatggggaagactgggaatctaagcagatgccacagtatcgagggagaactgagtttgtgaaggactccattgcaggggggcgtgtctctctaaggctaaaaaacatcactccctcggacatcggcctgtatgggtgctggttcagttcccagatttacgatgaggaggccacctgggagctgcgggtggcagcactgggctcacttcctctcatttccatcgtgggatatgttgacggaggtatccagttactctgcctgtcctcaggctggttcccccagcccacagccaagtggaaaggtccacaaggacaggatttgtcttcagactccagagcaaatgcagatgggtacagcctgtatgatgtggagatctccattatagtccaggaaaatgctgggagcatattgtgttccatccaccttgctgagcagagtcatgaggtggaatccaaggtattgataggagagacgtttttccagccctcaccttggcgcctggcttctattttactcgggttactctgtggtgccctgtgtggtgttgtcatggggatgataattgttttcttcaaatccaaagggaaaatccaggcggaactggactggagaagaaagcacggacaggcagaattgagagacgcccggaaacacgcagtggaggtgactctggatccagagacggctcacccgaagctctgcgtttctgatctgaaaactgtaacccatagaaaagctccccaggaggtgcctcactctgagaagagatttacaaggaagagtgtggtggcttctcagggtttccaagcagggaaacattactgggaggtggacgtgggacaaaatgtagggtggtatgtgggagtgtgtcgggatgacgtagacagggggaagaacaatgtgactttgtctcccaacaatgggtattgggtcctcagactgacaacagaacatttgtatttcacattcaatccccattttatcagcctcccccccagcacccctcctacacgagtaggggtcttcctggactatgagggtgggaccatctccttcttcaatacaaatgaccagtcccttatttataccctgctgacatgtcagtttgaaggcttgttgagaccctatatccagcatgcgatgtatgacgaggaaaaggggactcccatattcatatgtccagtgtcctggggatga

SEQ ID NO: 36 - protein, 466 aa, Homo sapiens
MAFVLILVLSFYELVSGQWQVTGPGKFVQALVGEDAVFSCSLFPETSAEAMEVRFFRNQFHAVVHLYRDGEDWESKQMPQYRGRTEFVKDSIAGGRVSLRLKNITPSDIGLYGCWFSSQIYDEEATWELRVAALGSLPLISIVGYVDGGIQLLCLSSGWFPQPTAKWKGPQGQDLSSDSRANADGYSLYDVEISIIVQENAGSILCSIHLAEQSHEVESKVLIGETFFQPSPWRLASILLGLLCGALCGVVMGMIIVFFKSKGKIQAELDWRRKHGQAELRDARKHAVEVTLDPETAHPKLCVSDLKTVTHRKAPQEVPHSEKRFTRKSVVASQGFQAGKHYWEVDVGQNVGWYVGVCRDDVDRGKNNVTLSPNNGYWVLRLTTEHLYFTFNPHFISLPPSTPPTRVGVFLDYEGGTISFFNTNDQSLIYTLLTCQFEGLLRPYIQHAMYDEEKGTPIFICPVSWG

SEQ ID NO: 37 - DNA, 1299 bp, Homo sapiens
atggcttttgtgctcattttggttctcagtttctacgagctggtgtcaggacagtggcaagtcactggaccgggcaagtttgtccaggccttggtgggggaggacgccgtgttctcctgctccctctttcctgagaccagtgcagaggctatggaagtgcggttcttcaggaatcagttccatgctgtggtccacctctacagagatggggaagactgggaatctaagcagatgccacagtatcgagggagaactgagtttgtgaaggactccattgcaggggggcgtgtctctctaaggctaaaaaacatcactccctcggacatcggcctgtatgggtgctggttcagttcccagatttacgatgaggaggccacctgggagctgcgggtggcagcactgggctcacttcctctcatttccatcgtgggatatgttgacggaggtatccagttactctgcctgtcctcagtccagccctcaccttggcgcctggcttctattttactcgggttactctgtggtgccctgtgtggtgttgtcatggggatgataattgttttcttcaaatccaaagggaaaatccaggcggaactgggtatgtgtcatgtcctgagcctcccacacatggttctcccgggtccctccctgatccacagtttgagcctctggacgaccctggctgcaggctggacaggaagcaccgactggagaagaaagcacggacaggcagaattgagagacgcccggaaacacgcagtggaggtgactctggatccagagacggctcacccgaagctctgcgtttctgatctgaaaactgtaacccatagaaaagctccccaggaggtgcctcactctgagaagagatttacaaggaagagtgtggtggcttctcagggtttccaagcagggaaacattactgggaggtggacgtgggacaaaatgtagggtggtatgtgggagtgtgtcgggatgacgtagacagggggaagaacaatgtgactttgtctcccaacaatgggtattgggtcctcagactgacaacagaacatttgtatttcacattcaatccccattttatcagcctcccccccagcacccctcctacacgagtaggggtcttcctggactatgagggtgggaccatctccttcttcaatacaaatgaccagtcccttatttataccctgctgacatgtcagtttgaaggcttgttgagaccctatatccagcatgcgatgtatgacgaggaaaaggggactcccatattcatatgtccagtgtcctggggatga

SEQ ID NO: 38 - protein, 432 aa, Homo sapiens
MAFVLILVLSFYELVSGQWQVTGPGKFVQALVGEDAVFSCSLFPETSAEAMEVRFFRNQFHAVVHLYRDGEDWESKQMPQYRGRTEFVKDSIAGGRVSLRLKNITPSDIGLYGCWFSSQIYDEEATWELRVAALGSLPLISIVGYVDGGIQLLCLSSVQPSPWRLASILLGLLCGALCGVVMGMIIVFFKSKGKIQAELGMCHVLSLPHMVLPGPSLIHSLSLWTTLAAGWTGSTDWRRKHGQAELRDARKHAVEVTLDPETAHPKLCVSDLKTVTHRKAPQEVPHSEKRFTRKSVVASQGFQAGKHYWEVDVGQNVGWYVGVCRDDVDRGKNNVTLSPNNGYWVLRLTTEHLYFTFNPHFISLPPSTPPTRVGVFLDYEGGTISFFNTNDQSLIYTLLTCQFEGLLRPYIQHAMYDEEKGTPIFICPVSWG

SEQ ID NO: 39 - DNA, 999 bp, Homo sapiens
atggctctcatgctcagtttggttctgagtctcctcaagctgggatcagggcagtggcaggtgtttgggccagacaagcctgtccaggccttggtgggggaggacgcagcattctcctgtttcctgtctcctaagaccaatgcagaggccatggaagtgcggttcttcaggggccagttctctagcgtggtccacctctacagggacgggaaggaccagccatttatgcagatgccacagtatcaaggcaggacaaaactggtgaaggattctattgcggaggggcgcatctctctgaggctggaaaacattactgtgttggatgctggcctctatgggtgcaggattagttcccagtcttactaccagaaggccatctgggagctacaggtgtcagcactgggctcagttcctctcatttccatcacgggatatgttgatagagacatccagctactctgtcagtcctcgggctggttcccccggcccacagcgaagtggaaaggtccacaaggacaggatttgtccacagactccaggacaaacagagacatgcatggcctgtttgatgtggagatctctctgaccgtccaagagaacgccgggagcatatcctgttccatgcggcatgctcatctgagccgagaggtggaatccagggtacagataggagatacctttttcgagcctatatcgtggcacctggctaccaaagtactgggaatactctgctgtggcctattttttggcattgttggactgaagattttcttctccaaattccagtgtaagcgagagagagaagcatgggccggtgccttattcatggttccagcagggacaggatcagagatgctcccacatccagctgcttctcttcttctagtcctagcctccaggggcccaggcccaaaaaaggaaaatccaggcggaactggactggagaagaaagcacggacaggcagaattgagagacgcccggaaacacgcagaggggga

SEQ ID NO: 40 - protein, 333 aa, Homo sapiens
MALMLSLVLSLLKLGSGQWQVFGPDKPVQALVGEDAAFSCFLSPKTNAEAMEVRFFRGQFSSVVHLYRDGKDQPFMQMPQYQGRTKLVKDSIAEGRISLRLENITVLDAGLYGCRISSQSYYQKAIWELQVSALGSVPLISITGYVDRDIQLLCQSSGWFPRPTAKWKGPQGQDLSTDSRTNRDMHGLFDVEISLTVQENAGSISCSMRHAHLSREVESRVQIGDTFFEPISWHLATKVLGILCCGLFFGIVGLKIFFSKFQCKREREAWAGALFMVPAGTGSEMLPHPAASLLLVLASRGPGPKKENPGGTGLEKKARTGRIERRPETRRGG

SEQ ID NO: 41 - DNA, 1128 bp, Homo sapiens
atgtggacatggtttgtcaaatcactgggctcagttcctctcatttccatcacgggatatgttgatagagacatccagctactctgtcagtcctcgggctggttcccccggcccacagcgaagtggaaaggtccacaaggacaggatttgtccacagactccaggacaaacagagacatgcatggcctgtttgatgtggagatctctctgaccgtccaagagaacgccgggagcatatcctgttccatgcggcatgctcatctgagccgagaggtggaatccagggtacagataggagatacctttttcgagcctatatcgtggcacctggctaccaaagtactgggaatactctgctgtggcctattttttggcattgttggactgaagattttcttctccaaattccagtggaaaatccaggcggaactggactggagaagaaagcacggacaggcagaattgagagacgcccggaaacacgcagtggaggtgactctggatccagagacggctcacccgaagctctgcgtttctgatctgaaaactgtaacccatagaaaagctccccaggaggtgcctcactctgagaagagatttacaaggaagagtgtggtggcttctcagagtttccaagcagggaaacattactgggaggtggacggaggacacaataaaaggtggcgcgtgggagtgtgccgggatgatgtggacaggaggaaggagtacgtgactttgtctcccgatcatgggtactgggtcctcagactgaatggagaacatttgtatttcacattaaatccccgttttatcagcgtcttccccaggaccccacctacaaaaataggggtcttcctggactatgagtgtgggaccatctccttcttcaacataaatgaccagtcccttatttataccctgacatgtcggtttgaaggcttattgaggccctacattgagtatccgtcctataatgagcaaaatggaactcccatagtcatctgcccagtcacccaggaatcagagaaagaggcctcttggcaaagggcctctgcaatcccagagacaagcaacagtgagtcctcctcacaggcaaccacgcccttcctccccaggggtgaaatgtag

SEQ ID NO: 42 - protein, 375 aa, Homo sapiens
MWTWFVKSLGSVPLISITGYVDRDIQLLCQSSGWFPRPTAKWKGPQGQDLSTDSRTNRDMHGLFDVEISLTVQENAGSISCSMRHAHLSREVESRVQIGDTFFEPISWHLATKVLGILCCGLFFGIVGLKIFFSKFQWKIQAELDWRRKHGQAELRDARKHAVEVTLDPETAHPKLCVSDLKTVTHRKAPQEVPHSEKRFTRKSVVASQSFQAGKHYWEVDGGHNKRWRVGVCRDDVDRRKEYVTLSPDHGYWVLRLNGEHLYFTLNPRFISVFPRTPPTKIGVFLDYECGTISFFNINDQSLIYTLTCRFEGLLRPYIEYPSYNEQNGTPIVICPVTQESEKEASWQRASAIPETSNSESSSQATTPFLPRGEM

SEQ ID NO: 43 - DNA, 2964 bp, Homo sapiens
atgcaccacctcctggagcagtcggcggacatggcgaccgcgctgctggcgggagagaagctgcgggagctgatcctgccgggcgcgcaggacgacaaggcgggcgcgctggccgcgctgcttctgcagctgaagctggagctgccgttcgaccgggtggtcaccatcggcaccgtgctggtgcccatcctgctggtcaccctggtcttcaccaagaacttcgcagaggaacccatttactgttacaccccgcacaacttcacgcgcgaccaggcgctgtacgcccgcggctactgctggacggagctgcgggacgcgctgcccggcgtggacgccagcctgtggccgtcgctgtttgagcacaagttcctgccctacgcgctgctggccttcgccgccatcatgtacgtgcccgcgctgggctgggagttcctggcctccacgcgcctcacctccgagctcaacttcctgctgcaggagatcgacaactgttaccaccgggcggccgagggccgcgcgcccaagatcgagaagcagatccagtccaagggcccgggcatcacggagcgcgagaagcgcgagatcatcgagaacgcggagaaggagaagagcccggagcagaacctgttcgagaagtacctggagcgccgcggccgcagcaacttcctggccaagctgtacctggcgcggcacgtgctgatcctgctgctgagcgccgtgcccatctcctacctgtgcacctactacgccacgcagaagcagaacgagttcacctgcgcgctgggcgcgtccccggacggggcggcaggtgcggggcccgcggtgcgcgtgagctgcaagctcccgtccgtgcaactgcagcgcatcatcgcgggcgtggacatcgtgctgctgtgcgtcatgaacctcatcatcctcgtcaacctcatccacctcttcatcttccgcaagagcaacttcatcttcgacaagctgcacaaggtgggcatcaagacgcgccggcagtggcgccgctcgcagttctgcgacatcaacatcctggccatgttctgcaacgagaaccgcgaccacatcaagtcgctcaaccggctggacttcatcaccaacgagagcgacctcatgtacgacaacgtggtccggcagctgctggcggcgctggcgcagtccaaccacgacgccacccccacggtgcgcgactcgggggtgcagaccgtggaccccagcgccaaccccgccgagcccgacggcgccgccgagccgcccgtggtcaagcggccgcgcaagaagatgaagtggatccccaccagcaacccgcttccgcagcccttcaaggagccgctggccatcatgcgcgtggagaacagcaaggcggagaagccgaagcccgcgcgcaggaagacggccacggacacgctgatcgcgccgctgctggaccgctccgcccaccactacaagggcggagggggcgacccgggccccggccccgcccctgcccccgccccgccgcccgcccctgacaagaagcacgcgcgccacttctccctggacgtgcacccctacatcctcggcaccaagaaggccaaggccgaggcggtgcccgccgccctgcccgcctcccggagccaggaggggggcttcctgtcccaggcggaggactgtgggctaggcctggccccggcgcccatcaaagatgctccgctccccgagaaggaaatcccgtaccccacagagccagcccgggcagggcttccctcggggggcccgttccacgtccgctcacctcccgccgcccctgctgtggcccctctgacaccagccagcctgggcaaggcggagcccctcaccatcctgagccgaaacgccacacacccgctgctgcacatcaacacgctatcctcatcgccaccttcgacgagccgagaacggtcgtgagtactgtggagttttgagggatggcaccgtccaggccgccgagagcccctctgcctgtgtcgtgtggcctggccagcctcccggtggacaccagccctgcgtggacgtggcctgtgcttcgcccgcactgcgcgcatccccaacctctgtccgcatgcctggggccttcgcccccacgtgctcgacaggggaacccgcccggacggcatcgccaggcactggctggggtggggaaaggtggcccagtggagccggtggccaggaaggctgaagcccgcttcccatgctcctgcatcaggtgcccagccgtgggtgggggccctgaggtgaagagtttatttttttagtccgtttcgtcctggccccgggctgtggcgagacagcccaactcccccagcccagctcccccagcccagagccagggaagaggaaggtggggccagtcccaccagtggggtggccacgcccatggggtcacatgctcaggggtcaccccctgcagggacctgatgccctcgggtgggagggaccgaggtccaccctcgggtcaaaggtcaacgtgcactttctccttgtcgcctgacagacattttattttactaagactgctgtaccgaacaagcatatttatcatcaggagacaggatgggtttaaagcaggatggtgtgtgtgtgaacgggcatgagcagaggtgagcgtgagcgagcgggtgtgtatgtacgagtgtgcacgtgtgtgcgtgtgcacagagggtgtggtgccagcttgagtgggagtgtgtgagtgtgagcaggcgggcgagtgcgtgagtgcacgccagcgcgtggcccatgtatgaggagtgaaggggcccaacgcaataaccacgtcccccacccgggccccccgccgcggctgaggccacatggcttcctgtgggagccccggccggcacccggctggtcccaccccaaatacctcagccatggagaccatgtcatgcagaattaacaaggtagcaccgagcatatcaataaatattattctgataa

SEQ ID NO: 44 - protein, 643 aa, Homo sapiens
MHHLLEQSADMATALLAGEKLRELILPGAQDDKAGALAALLLQLKLELPFDRVVTIGTVLVPILLVTLVFTKNFAEEPIYCYTPHNFTRDQALYARGYCWTELRDALPGVDASLWPSLFEHKFLPYALLAFAAIMYVPALGWEFLASTRLTSELNFLLQEIDNCYHRAAEGRAPKIEKQIQSKGPGITEREKREIIENAEKEKSPEQNLFEKYLERRGRSNFLAKLYLARHVLILLLSAVPISYLCTYYATQKQNEFTCALGASPDGAAGAGPAVRVSCKLPSVQLQRIIAGVDIVLLCVMNLIILVNLIHLFIFRKSNFIFDKLHKVGIKTRRQWRRSQFCDINILAMFCNENRDHIKSLNRLDFITNESDLMYDNVVRQLLAALAQSNHDATPTVRDSGVQTVDPSANPAEPDGAAEPPVVKRPRKKMKWIPTSNPLPQPFKEPLAIMRVENSKAEKPKPARRKTATDTLIAPLLDRSAHHYKGGGGDPGPGPAPAPAPPPAPDKKHARHFSLDVHPYILGTKKAKAEAVPAALPASRSQEGGFLSQAEDCGLGLAPAPIKDAPLPEKEIPYPTEPARAGLPSGGPFHVRSPPAAPAVAPLTPASLGKAEPLTILSRNATHPLLHINTLSSSPPSTSRERS

SEQ ID NO: 45 - DNA, 3051 bp, Homo sapiens
atgcaccacctcctggagcagtcggcggacatggcgaccgcgctgctggcgggagagaagctgcgggagctgatcctgccgggcgcgcaggacgacaaggcgggcgcgctggccgcgctgcttctgcagctgaagctggagctgccgttcgaccgggtggtcaccatcggcaccgtgctggtgcccatcctgctggtcaccctggtcttcaccaagaacttcgcagaggaacccatttactgttacaccccgcacaacttcacgcgcgaccaggcgctgtacgcccgcggctactgctggacggagctgcgggacgcgctgcccggcgtggacgccagcctgtggccgtcgctgtttgagcacaagttcctgccctacgcgctgctggccttcgccgccatcatgtacgtgcccgcgctgggctgggagttcctggcctccacgcgcctcacctccgagctcaacttcctgctgcaggagatcgacaactgttaccaccgggcggccgagggccgcgcgcccaagatcgagaagcagatccagtccaagggcccgggcatcacggagcgcgagaagcgcgagatcatcgagaacgcggagaaggagaagagcccggagcagaacctgttcgagaagtacctggagcgccgcggccgcagcaacttcctggccaagctgtacctggcgcggcacgtgctgatcctgctgctgagcgccgtgcccatctcctacctgtgcacctactacgccacgcagaagcagaacgagttcacctgcgcgctgggcgcgtccccggacggggcggcaggtgcggggcccgcggtgcgcgtgagctgcaagctcccgtccgtgcaactgcagcgcatcatcgcgggcgtggacatcgtgctgctgtgcgtcatgaacctcatcatcctcgtcaacctcatccacctcttcatcttccgcaagagcaacttcatcttcgacaagctgcacaaggtgggcatcaagacgcgccggcagtggcgccgctcgcagttctgcgacatcaacatcctggccatgttctgcaacgagaaccgcgaccacatcaagtcgctcaaccggctggacttcatcaccaacgagagcgacctcatgtacgacaacgtggtccggcagctgctggcggcgctggcgcagtccaaccacgacgccacccccacggtgcgcgactcgggggtgcagaccgtggaccccagcgccaaccccgccgagcccgacggcgccgccgagccgcccgtggtcaagcggccgcgcaagaagatgaagtggatccccaccagcaacccgcttccgcagcccttcaaggagccgctggccatcatgcgcgtggagaacagcaaggcggagaagccgaagcccgcgcgcaggaagacggccacggacacgctgatcgcgccgctgctggaccgctccgcccaccactacaagggcggagggggcgacccgggccccggccccgcccctgcccccgccccgccgcccgcccctgacaagaagcacgcgcgccacttctccctggacgtgcacccctacatcctcggcaccaagaaggccaaggccgaggcggtgcccgccgccctgcccgcctcccggagccaggaggggggcttcctgtcccaggcggaggactgtgggctaggcctggccccggcgcccatcaaagatgctccgctccccgagaaggaaatcccgtaccccacagagccagcccgggcagggcttccctcggggggcccgttccacgtccgctcacctcccgccgcccctgctgtggcccctctgacaccagccagcctgggcaaggcggagcccctcaccatcctgagccgaaacgccacacacccgctgctgcacatcaacacgctgtacgaggcccgggaggaggaggacgggggcccccgcctgccgcaggacgtgggggacctcatcgccatccctgccccacagcagatcctcatcgccaccttcgacgagccgagaacggtcgtgagtactgtggagttttgagggatggcaccgtccaggccgccgagagcccctctgcctgtgtcgtgtggcctggccagcctcccggtggacaccagccctgcgtggacgtggcctgtgcttcgcccgcactgcgcgcatccccaacctctgtccgcatgcctggggccttcgcccccacgtgctcgacaggggaacccgcccggacggcatcgccaggcactggctggggtggggaaaggtggcccagtggagccggtggccaggaaggctgaagcccgcttcccatgctcctgcatcaggtgcccagccgtgggtgggggccctgaggtgaagagtttatttttttagtccgtttcgtcctggccccgggctgtggcgagacagcccaactcccccagcccagctcccccagcccagagccagggaagaggaaggtggggccagtcccaccagtggggtggccacgcccatggggtcacatgctcaggggtcaccccctgcagggacctgatgccctcgggtgggagggaccgaggtccaccctcgggtcaaaggtcaacgtgcactttctccttgtcgcctgacagacattttattttactaagactgctgtaccgaacaagcatatttatcatcaggagacaggatgggtttaaagcaggatggtgtgtgtgtgaacgggcatgagcagaggtgagcgtgagcgagcgggtgtgtatgtacgagtgtgcacgtgtgtgcgtgtgcacagagggtgtggtgccagcttgagtgggagtgtgtgagtgtgagcaggcgggcgagtgcgtgagtgcacgccagcgcgtggcccatgtatgaggagtgaaggggcccaacgcaataaccacgtcccccacccgggccccccgccgcggctgaggccacatggcttcctgtgggagccccggccggcacccggctggtcccaccccaaatacctcagccatggagaccatgtcatgcagaattaacaaggtagcaccgagcatatcaataaatattattctgataatc

SEQ ID NO: 46 - protein, 677 aa, Homo sapiens
MHHLLEQSADMATALLAGEKLRELILPGAQDDKAGALAALLLQLKLELPFDRVVTIGTVLVPILLVTLVFTKNFAEEPIYCYTPHNFTRDQALYARGYCWTELRDALPGVDASLWPSLFEHKFLPYALLAFAAIMYVPALGWEFLASTRLTSELNFLLQEIDNCYHRAAEGRAPKIEKQIQSKGPGITEREKREIIENAEKEKSPEQNLFEKYLERRGRSNFLAKLYLARHVLILLLSAVPISYLCTYYATQKQNEFTCALGASPDGAAGAGPAVRVSCKLPSVQLQRIIAGVDIVLLCVMNLIILVNLIHLFIFRKSNFIFDKLHKVGIKTRRQWRRSQFCDINILAMFCNENRDHIKSLNRLDFITNESDLMYDNVVRQLLAALAQSNHDATPTVRDSGVQTVDPSANPAEPDGAAEPPVVKRPRKKMKWIPTSNPLPQPFKEPLAIMRVENSKAEKPKPARRKTATDTLIAPLLDRSAHHYKGGGGDPGPGPAPAPAPPPAPDKKHARHFSLDVHPYILGTKKAKAEAVPAALPASRSQEGGFLSQAEDCGLGLAPAPIKDAPLPEKEIPYPTEPARAGLPSGGPFHVRSPPAAPAVAPLTPASLGKAEPLTILSRNATHPLLHINTLYEAREEEDGGPRLPQDVGDLIAIPAPQQILIATFDEPRTVVSTVEF

SEQ ID NO: 47 - DNA, 1932 bp, Homo sapiens
atgcaccacctcctggagcagtcggcggacatggcgaccgcgctgctggcgggagagaagctgcgggagctgatcctgccgggcgcgcaggacgacaaggcgggcgcgctggccgcgctgcttctgcagctgaagctggagctgccgttcgaccgggtggtcaccatcggcaccgtgctggtgcccatcctgctggtcaccctggtcttcaccaagaacttcgcagaggaacccatttactgttacaccccgcacaacttcacgcgcgaccaggcgctgtacgcccgcggctactgctggacggagctgcgggacgcgctgcccggcgtggacgccagcctgtggccgtcgctgtttgagcacaagttcctgccctacgcgctgctggccttcgccgccatcatgtacgtgcccgcgctgggctgggagttcctggcctccacgcgcctcacctccgagctcaacttcctgctgcaggagatcgacaactgttaccaccgggcggccgagggccgcgcgcccaagatcgagaagcagatccagtccaagggcccgggcatcacggagcgcgagaagcgcgagatcatcgagaacgcggagaaggagaagagcccggagcagaacctgttcgagaagtacctggagcgccgcggccgcagcaacttcctggccaagctgtacctggcgcggcacgtgctgatcctgctgctgagcgccgtgcccatctcctacctgtgcacctactacgccacgcagaagcagaacgagttcacctgcgcgctgggcgcgtccccggacggggcggcaggtgcggggcccgcggtgcgcgtgagctgcaagctcccgtccgtgcaactgcagcgcatcatcgcgggcgtggacatcgtgctgctgtgcgtcatgaacctcatcatcctcgtcaacctcatccacctcttcatcttccgcaagagcaacttcatcttcgacaagctgcacaaggtgggcatcaagacgcgccggcagtggcgccgctcgcagttctgcgacatcaacatcctggccatgttctgcaacgagaaccgcgaccacatcaagtcgctcaaccggctggacttcatcaccaacgagagcgacctcatgtacgacaacgtggtccggcagctgctggcggcgctggcgcagtccaaccacgacgccacccccacggtgcgcgactcgggggtgcagaccgtggaccccagcgccaaccccgccgagcccgacggcgccgccgagccgcccgtggtcaagcggccgcgcaagaagatgaagtggatccccaccagcaacccgcttccgcagcccttcaaggagccgctggccatcatgcgcgtggagaacagcaaggcggagaagccgaagcccgcgcgcaggaagacggccacggacacgctgatcgcgccgctgctggaccgctccgcccaccactacaagggcggagggggcgacccgggccccggccccgcccctgcccccgccccgccgcccgcccctgacaagaagcacgcgcgccacttctccctggacgtgcacccctacatcctcggcaccaagaaggccaaggccgaggcggtgcccgccgccctgcccgcctcccggagccaggaggggggcttcctgtcccaggcggaggactgtgggctaggcctggccccggcgcccatcaaagatgctccgctccccgagaaggaaatcccgtaccccacagagccagcccgggcagggcttccctcggggggcccgttccacgtccgctcacctcccgccgcccctgctgtggcccctctgacaccagccagcctgggcaaggcggagcccctcaccatcctgagccgaaacgccacacacccgctgctgcacatcaacacgctatcctcatcgccaccttcgacgagccgagaacggtcgtga

SEQ ID NO: 48 - protein, 633 aa, Homo sapiens
MATALLAGEKLRELILPGAQDDKAGALAALLLQLKLELPFDRVVTIGTVLVPILLVTLVFTKNFAEEPIYCYTPHNFTRDQALYARGYCWTELRDALPGVDASLWPSLFEHKFLPYALLAFAAIMYVPALGWEFLASTRLTSELNFLLQEIDNCYHRAAEGRAPKIEKQIQSKGPGITEREKREIIENAEKEKSPEQNLFEKYLERRGRSNFLAKLYLARHVLILLLSAVPISYLCTYYATQKQNEFTCALGASPDGAAGAGPAVRVSCKLPSVQLQRIIAGVDIVLLCVMNLIILVNLIHLFIFRKSNFIFDKLHKVGIKTRRQWRRSQFCDINILAMFCNENRDHIKSLNRLDFITNESDLMYDNVVRQLLAALAQSNHDATPTVRDSGVQTVDPSANPAEPDGAAEPPVVKRPRKKMKWIPTSNPLPQPFKEPLAIMRVENSKAEKPKPARRKTATDTLIAPLLDRSAHHYKGGGGDPGPGPAPAPAPPPAPDKKHARHFSLDVHPYILGTKKAKAEAVPAALPASRSQEGGFLSQAEDCGLGLAPAPIKDAPLPEKEIPYPTEPARAGLPSGGPFHVRSPPAAPAVAPLTPASLGKAEPLTILSRNATHPLLHINTLSSSPPSTSRERS

SEQ ID NO: 49 - DNA, 1791 bp, Homo sapiens
atgagcaactacagtgtgtcactggttggcccagctccttggggtttccggctgcagggcggtaaggatttcaacatgcctctgacaatctctagtctaaaagatggcggcaaggcagcccaggcaaatgtaagaataggcgatgtggttctcagcattgatggaataaatgcacaaggaatgactcatcttgaagcccagaataagattaagggttgtacaggctctttgaatatgactctgcaaagagcatctgctgcacccaagcctgagccggttcctgttcaaaagggagaacctaaagaagtagttaaacctgtgcccattacatctcctgctgtgtccaaagtcacttccacaaacaacatggcctacaataaggcaccacggccttttggttctgtgtcttcaccaaaagtcacatccatcccatcaccatcgtctgccttcaccccagcccatgcgaccacctcatcacatgcttccccttcacccgtggctgccgtcactcctcccctgttcgctgcatctggactgcatgctaatgccaatcttagtgctgaccagtctccatctgcactgagcgctggtaaaactgcagttaatgtcccacggcagcccacagtcaccagcgtgtgttccgagacttctcaggagctagcagagggacagagaagaggatcccagggtgacagtaaacagcaaaatggcccaccaagaaaacacattgtggagcgctatacagagttttatcatgtacccactcacagtgatgccagcaagaagagactgattgaggatactgaagactggcgtccaaggactggaacaactcagtctcgctctttccgaatccttgcccagatcactgggactgaacatttgaaagaatctgaagccgataatacaaagaaggcaaataactctcaggagccttctccgcagttggcttcctcggtagcttccacacggagcatgcccgagagcctggacagcccaacctctggcagaccaggggttaccagcctcacagctgcagctgccttcaagcctgtaggatccactggcgtcatcaagtcaccaagctggcaacggccaaaccaaggagtaccttccactggaagaatctcaaacagcgctacttactcaggatcagtggcaccagccaactcagctttgggacaaacccagccaagtgaccaggacactttagtgcaaagagctgagcacattccagcagggaaacgaactccgatgtgcgcccattgtaaccaggtcatcagaggaccattcttagtggcactggggaaatcttggcacccagaagaattcaactgcgctcactgcaaaaatacaatggcctacattggatttgtagaggagaaaggagccctgtattgtgagctgtgctatgagaaattctttgcccctgaatgtggtcgatgccaaaggaagatccttggagaagtcatcagtgcgttgaaacaaacttggcatgtttcctgttttgtgtgtgtagcctgtggaaagcccattcggaacaatgtttttcacttggaggatggtgaaccctactgtgagactgattattatgccctctttggtactatatgccatggatgtgaatttcccatagaagctggtgacatgttcctggaagctctgggctacacctggcatgacacttgctttgtatgctcagtgtgttgtgaaagtttggaaggtcagacctttttctccaagaaggacaagcccctgtgtaagaaacatgctcattctgtgaatttttga

SEQ ID NO: 50 - protein, 596 aa, Homo sapiens
MSNYSVSLVGPAPWGFRLQGGKDFNMPLTISSLKDGGKAAQANVRIGDVVLSIDGINAQGMTHLEAQNKIKGCTGSLNMTLQRASAAPKPEPVPVQKGEPKEVVKPVPITSPAVSKVTSTNNMAYNKAPRPFGSVSSPKVTSIPSPSSAFTPAHATTSSHASPSPVAAVTPPLFAASGLHANANLSADQSPSALSAGKTAVNVPRQPTVTSVCSETSQELAEGQRRGSQGDSKQQNGPPRKHIVERYTEFYHVPTHSDASKKRLIEDTEDWRPRTGTTQSRSFRILAQITGTEHLKESEADNTKKANNSQEPSPQLASSVASTRSMPESLDSPTSGRPGVTSLTAAAAFKPVGSTGVIKSPSWQRPNQGVPSTGRISNSATYSGSVAPANSALGQTQPSDQDTLVQRAEHIPAGKRTPMCAHCNQVIRGPFLVALGKSWHPEEFNCAHCKNTMAYIGFVEEKGALYCELCYEKFFAPECGRCQRKILGEVISALKQTWHVSCFVCVACGKPIRNNVFHLEDGEPYCETDYYALFGTICHGCEFPIEAGDMFLEALGYTWHDTCFVCSVCCESLEGQTFFSKKDKPLCKKHAHSVNF

SEQ ID NO: 51 - DNA, 1245 bp, Homo sapiens
atggctgcagctcctccaagttactgttttgttgccttccctccacgtgctaaggatggtctggtggtatttgggaaaaattcagcccggcccagagatgaagtgcaagaggttgtgtatttctcggctgctgatcacgaaccggagagcaaggttgagtgcacttacatttcaatcgaccaagttccaaggacctatgccataatgataagcagacccgcctggctctggggagcagaaatgggagccaatgaacatggagtgtgcatagccaatgaagccatcaacaccagagagccagctgccgagatagaagccttgctggggatggatctggtcaggcttggtttagaaagaggggaaacagctaaagaagccttagatgtcattgtctccttgttggaagaacatggacaaggtgggaattactttgaagatgcaaactcctgccacagcttccaaagtgcatatctgattgtggatcgtgatgaagcctgggtgctcgagaccatagggaagtactgggctgccgagaaagtcacagagggagtgaggtgcatttgcagtcagctttcgctcaccactaagatggatgcagagcatccggaactcaggagttacgctcagagccaaggttggtggacgggagagggcgagttcaatttttccgaagtcttttctccagttgaggatcatctagactgcggtgctggcaaagacagcttagaaaaacaagaagaaagcatcacagtgcagactatgatgaacaccttacgggacaaagccagcggagtgtgcatagactctgagtttttcctcaccacagccagtggagtgtctgtcctgccgcagaatagaagctctccgtgcattcactacttcactggaacccctgatccttccaggtccatattcaagcctttcatctttgttgatgacgtaaaacttgtccccaaaacacagtctccctgttttggggatgacgaccctgccaaaaaggagcctcggttccaggagaaaccagaccgccggcatgagctgtacaaagcccacgagtgggcacgtgccatcatcgaaagtgaccaggagcaaggtcgcaagctgaggagcaccatgctggagctggagaagcaaggcctggaagccatggaagaaatcctgaccagctccgagccactggaccctgcggaagtgggggaccttttctatgactgtgttgacacggagattaagttctttaagtga

SEQ ID NO: 52 - protein, 414 aa, Homo sapiens
MAAAPPSYCFVAFPPRAKDGLVVFGKNSARPRDEVQEVVYFSAADHEPESKVECTYISIDQVPRTYAIMISRPAWLWGAEMGANEHGVCIANEAINTREPAAEIEALLGMDLVRLGLERGETAKEALDVIVSLLEEHGQGGNYFEDANSCHSFQSAYLIVDRDEAWVLETIGKYWAAEKVTEGVRCICSQLSLTTKMDAEHPELRSYAQSQGWWTGEGEFNFSEVFSPVEDHLDCGAGKDSLEKQEESITVQTMMNTLRDKASGVCIDSEFFLTTASGVSVLPQNRSSPCIHYFTGTPDPSRSIFKPFIFVDDVKLVPKTQSPCFGDDDPAKKEPRFQEKPDRRHELYKAHEWARAIIESDQEQGRKLRSTMLELEKQGLEAMEEILTSSEPLDPAEVGDLFYDCVDTEIKFFK

SEQ ID NO: 53 - DNA, 1245 bp, Homo sapiens; identical to SEQ ID NO: 51

SEQ ID NO: 54 - protein, 414 aa, Homo sapiens; identical to SEQ ID NO: 52

SEQ ID NO: 55 - DNA, 1305 bp, Homo sapiens
atggtacaggacggcacttttaaaaccagggactcgacttggacgtgcgagtcaacaaggatggctgcagctcctccaagttactgttttgttgccttccctccacgtgctaaggatggtctggtggtatttgggaaaaattcagcccggcccagagatgaagtgcaagaggttgtgtatttctcggctgctgatcacgaaccggagagcaaggttgagtgcacttacatttcaatcgaccaagttccaaggacctatgccataatgataagcagacccgcctggctctggggagcagaaatgggagccaatgaacatggagtgtgcatagccaatgaagccatcaacaccagagagccagctgccgagatagaagccttgctggggatggatctggtcaggcttggtttagaaagaggggaaacagctaaagaagccttagatgtcattgtctccttgttggaagaacatggacaaggtgggaattactttgaagatgcaaactcctgccacagcttccaaagtgcatatctgattgtggatcgtgatgaagcctgggtgctcgagaccatagggaagtactgggctgccgagaaagtcacagagggagtgaggtgcatttgcagtcagctttcgctcaccactaagatggatgcagagcatccggaactcaggagttacgctcagagccaaggttggtggacgggagagggcgagttcaatttttccgaagtcttttctccagttgaggatcatctagactgcggtgctggcaaagacagcttagaaaaacaagaagaaagcatcacagtgcagactatgatgaacaccttacgggacaaagccagcggagtgtgcatagactctgagtttttcctcaccacagccagtggagtgtctgtcctgccgcagaatagaagctctccgtgcattcactacttcactggaacccctgatccttccaggtccatattcaagcctttcatctttgttgatgacgtaaaacttgtccccaaaacacagtctccctgttttggggatgacgaccctgccaaaaaggagcctcggttccaggagaaaccagaccgccggcatgagctgtacaaagcccacgagtgggcacgtgccatcatcgaaagtgaccaggagcaaggtcgcaagctgaggagcaccatgctggagctggagaagcaaggcctggaagccatggaagaaatcctgaccagctccgagccactggaccctgcggaagtgggggaccttttctatgactgtgttgacacggagattaagttctttaagtga

SEQ ID NO: 56 - protein, 434 aa, Homo sapiens
MVQDGTFKTRDSTWTCESTRMAAAPPSYCFVAFPPRAKDGLVVFGKNSARPRDEVQEVVYFSAADHEPESKVECTYISIDQVPRTYAIMISRPAWLWGAEMGANEHGVCIANEAINTREPAAEIEALLGMDLVRLGLERGETAKEALDVIVSLLEEHGQGGNYFEDANSCHSFQSAYLIVDRDEAWVLETIGKYWAAEKVTEGVRCICSQLSLTTKMDAEHPELRSYAQSQGWWTGEGEFNFSEVFSPVEDHLDCGAGKDSLEKQEESITVQTMMNTLRDKASGVCIDSEFFLTTASGVSVLPQNRSSPCIHYFTGTPDPSRSIFKPFIFVDDVKLVPKTQSPCFGDDDPAKKEPRFQEKPDRRHELYKAHEWARAIIESDQEQGRKLRSTMLELEKQGLEAMEEILTSSEPLDPAEVGDLFYDCVDTEIKFFK

SEQ ID NO: 57 - DNA, 737 bp, Homo sapiens
atggctgcagctcctccaagttactgttttgttgccttccctccacgtgctaaggatggtctggtggtatttgggaaaaattcagcccggcccagagatgaagtgcaagaggttgtgtatttctcggctgctgatcacgaaccggagagcaaggttgagtgcacttacatttcaatcgaccaagttccaaggacctatgccataatgataagcagacccgcctggctctggggagcagaaatgggagccaatgaacatggagtgtgcatagccaatgaagccatcaacaccagagagccagctgccgagatagaagccttgctggggatggatctggtcaggcttggtttagaaagaggggaaacagctaaagaagccttagatgtcattgtctccttgttggaagaacatggacaaggtgggaattactttgaagatgcaaactcctgccacagcttccaaagtgcatatctgattgtggatcgtgatgaagcctgggtgctcgagaccatagggaagtactgggctgccgagaaagtcacagagggagtgaggtgcatttgcagtcagctttcgctcaccactaagatggatgcagagcatccggaactcaggagttacgctcagagccaaggttggtggacgggagagggcgagttcaatttttccgaagtcttttctccagttgaggatcatctagactgcggtgctggcaaagacagcttagaaaaacaaga

SEQ ID NO: 58 - protein, 245 aa, Homo sapiens
MAAAPPSYCFVAFPPRAKDGLVVFGKNSARPRDEVQEVVYFSAADHEPESKVECTYISIDQVPRTYAIMISRPAWLWGAEMGANEHGVCIANEAINTREPAAEIEALLGMDLVRLGLERGETAKEALDVIVSLLEEHGQGGNYFEDANSCHSFQSAYLIVDRDEAWVLETIGKYWAAEKVTEGVRCICSQLSLTTKMDAEHPELRSYAQSQGWWTGEGEFNFSEVFSPVEDHLDCGAGKDSLEKQ

SEQ ID NO: 59 - DNA, 1041 bp, Homo sapiens
atgataagcagacccgcctggctctggggagcagaaatgggagccaatgaacatggagtgtgcatagccaatgaagccatcaacaccagagagccagctgccgagatagaagccttgctggggatggatctggtcaggcttggtttagaaagaggggaaacagctaaagaagccttagatgtcattgtctccttgttggaagaacatggacaaggtgggaattactttgaagatgcaaactcctgccacagcttccaaagtgcatatctgattgtggatcgtgatgaagcctgggtgctcgagaccatagggaagtactgggctgccgagaaagtcacagagggagtgaggtgcatttgcagtcagctttcgctcaccactaagatggatgcagagcatccggaactcaggagttacgctcagagccaaggttggtggacgggagagggcgagttcaatttttccgaagtcttttctccagttgaggatcatctagactgcggtgctggcaaagacagcttagaaaaacaagaagaaagcatcacagtgcagactatgatgaacaccttacgggacaaagccagcggagtgtgcatagactctgagtttttcctcaccacagccagtggagtgtctgtcctgccgcagaatagaagctctccgtgcattcactacttcactggaacccctgatccttccaggtccatattcaagcctttcatctttgttgatgacgtaaaacttgtccccaaaacacagtctccctgttttggggatgacgaccctgccaaaaaggagcctcggttccaggagaaaccagaccgccggcatgagctgtacaaagcccacgagtgggcacgtgccatcatcgaaagtgaccaggagcaaggtcgcaagctgaggagcaccatgctggagctggagaagcaaggcctggaagccatggaagaaatcctgaccagctccgagccactggaccctgcggaagtgggggaccttttctatgactgtgttgacacggagattaagttctttaagtga

SEQ ID NO: 60 - protein, 346 aa, Homo sapiens
MISRPAWLWGAEMGANEHGVCIANEAINTREPAAEIEALLGMDLVRLGLERGETAKEALDVIVSLLEEHGQGGNYFEDANSCHSFQSAYLIVDRDEAWVLETIGKYWAAEKVTEGVRCICSQLSLTTKMDAEHPELRSYAQSQGWWTGEGEFNFSEVFSPVEDHLDCGAGKDSLEKQEESITVQTMMNTLRDKASGVCIDSEFFLTTASGVSVLPQNRSSPCIHYFTGTPDPSRSIFKPFIFVDDVKLVPKTQSPCFGDDDPAKKEPRFQEKPDRRHELYKAHEWARAIIESDQEQGRKLRSTMLELEKQGLEAMEEILTSSEPLDPAEVGDLFYDCVDTEIKFFK

SEQ ID NO: 61 - DNA, 1245 bp, Homo sapiens; identical to SEQ ID NO: 51

SEQ ID NO: 62 - protein, 414 aa, Homo sapiens; identical to SEQ ID NO: 52

SEQ ID NO: 63 - DNA, 339 bp, Homo sapiens
atggctgcagctcctccaagttactgttttgttgccttccctccacgtgctaaggatggtctggtggtatttgggaaaaattcagcccggcccagagatgaagtgcaagaggttgtgtatttctcggctgctgatcacgaaccggagagcaaggttgagtgcacttacatttcaatcgaccaagttccaaggacctatgccataatgataagcagacccgcctggctctggggagcagaaatgggagccaatgaacatggagtgtgcatagccaatgaagccatcaacaccagagagccagctgccgagatagaagccttgctggggatggatctggtc

SEQ ID NO: 64 - protein, 113 aa, Homo sapiens
MAAAPPSYCFVAFPPRAKDGLVVFGKNSARPRDEVQEVVYFSAADHEPESKVECTYISIDQVPRTYAIMISRPAWLWGAEMGANEHGVCIANEAINTREPAAEIEALLGMDLV

SEQ ID NO: 65 - DNA, 1110 bp, Homo sapiens
atggtgtgggcgcccttgggacccccgaggactgattgtctgaccttgcttcacacgcccagtaaggactcccccaagatgtcgctcgagtggctggtggcctggagctggtcgctggatggcctgagggactgcatcgccaccggcatccagtccgtgcgggactgcgacaccaccgctgtcatcactgtggcctgcctcctggtcctcttcgtgtggtactgttatcacgtgggcagggagcagccccggccctacgtctccgtcaactccctcatgcaggctgccgatgccaacgggctgcagaatggctacgtgtactgccagtcccctgagtgcgtgcgctgcacccacaacgagggcctcaaccagaagctgtaccacaacctgcaggagtacgccaagcgctactcctggtccggcatgggccgcatccacaagggcatccgcgagcagggccggtacctcaacagccggccctccatccagaagcccgaggtcttcttcctgcccgacctgcccaccacgccctatttctcccgggacgcacagaaacatgatgtggaagtgctggaacggaacttccagaccatcctgtgtgagtttgagaccctctacaaagctttctcaaactgcagcctcccgcaaggatggaaaatgaacagcacccccagcggggagtggttcaccttttacttggtcaatcagggggtttgtgttcccaggaactgtaggaagtgcccacggacgtaccgcttgctcggaagccttcggacctgtattgggaacaatgtttttgggaacgcgtgcatctctgtgctgagccctgggactgtgataacggagcactatggacccaccaacatccgcatccgatgccatttaggtctgaaaactccaaatggctgtgagctggtggtggggggagagccccagtgctgggcagaagggcgctgccttctctttgatgactctttcctgcatgctgcgttccatgaaggttcagcagaggatggcccacgggtggttttcatggtggatttgtggcatccaaacgtcgcagcggccgaacggcaggctcttgatttcatctttgctccgggacgatga

SEQ ID NO: 66 - protein, 369 aa, Homo sapiens
MVWAPLGPPRTDCLTLLHTPSKDSPKMSLEWLVAWSWSLDGLRDCIATGIQSVRDCDTTAVITVACLLVLFVWYCYHVGREQPRPYVSVNSLMQAADANGLQNGYVYCQSPECVRCTHNEGLNQKLYHNLQEYAKRYSWSGMGRIHKGIREQGRYLNSRPSIQKPEVFFLPDLPTTPYFSRDAQKHDVEVLERNFQTILCEFETLYKAFSNCSLPQGWKMNSTPSGEWFTFYLVNQGVCVPRNCRKCPRTYRLLGSLRTCIGNNVFGNACISVLSPGTVITEHYGPTNIRIRCHLGLKTPNGCELVVGGEPQCWAEGRCLLFDDSFLHAAFHEGSAEDGPRVVFMVDLWHPNVAAAERQALDFIFAPGR

SEQ ID NO: 67 - DNA, 1032 bp, Homo sapiens
atgtcgctcgagtggctggtggcctggagctggtcgctggatggcctgagggactgcatcgccaccggcatccagtccgtgcgggactgcgacaccaccgctgtcatcactgtggcctgcctcctggtcctcttcgtgtggtactgttatcacgtgggcagggagcagccccggccctacgtctccgtcaactccctcatgcaggctgccgatgccaacgggctgcagaatggctacgtgtactgccagtcccctgagtgcgtgcgctgcacccacaacgagggcctcaaccagaagctgtaccacaacctgcaggagtacgccaagcgctactcctggtccggcatgggccgcatccacaagggcatccgcgagcagggccggtacctcaacagccggccctccatccagaagcccgaggtcttcttcctgcccgacctgcccaccacgccctatttctcccgggacgcacagaaacatgatgtggaagtgctggaacggaacttccagaccatcctgtgtgagtttgagaccctctacaaagctttctcaaactgcagcctcccgcaaggatggaaaatgaacagcacccccagcggggagtggttcaccttttacttggtcaatcagggggtttgtgttcccaggaactgtaggaagtgcccacggacgtaccgcttgctcggaagccttcggacctgtattgggaacaatgtttttgggaacgcgtgcatctctgtgctgagccctgggactgtgataacggagcactatggacccaccaacatccgcatccgatgccatttaggtctgaaaactccaaatggctgtgagctggtggtggggggagagccccagtgctgggcagaagggcgctgccttctctttgatgactctttcctgcatgctgcgttccatgaaggttcagcagaggatggcccacgggtggttttcatggtggatttgtggcatccaaacgtcgcagcggccgaacggcaggctcttgatttcatctttgctccgggacgatga

SEQ ID NO: 68 - protein, 343 aa, Homo sapiens
MSLEWLVAWSWSLDGLRDCIATGIQSVRDCDTTAVITVACLLVLFVWYCYHVGREQPRPYVSVNSLMQAADANGLQNGYVYCQSPECVRCTHNEGLNQKLYHNLQEYAKRYSWSGMGRIHKGIREQGRYLNSRPSIQKPEVFFLPDLPTTPYFSRDAQKHDVEVLERNFQTILCEFETLYKAFSNCSLPQGWKMNSTPSGEWFTFYLVNQGVCVPRNCRKCPRTYRLLGSLRTCIGNNVFGNACISVLSPGTVITEHYGPTNIRIRCHLGLKTPNGCELVVGGEPQCWAEGRCLLFDDSFLHAAFHEGSAEDGPRVVFMVDLWHPNVAAAERQALDFIFAPGR

SEQ ID NO: 69 - DNA, 1110 bp, Homo sapiens; identical to SEQ ID NO: 65

SEQ ID NO: 70 - protein, 369 aa, Homo sapiens; identical to SEQ ID NO: 66

SEQ ID NO: 71 - DNA, 519 bp, Homo sapiens
atgaggcgccagcctgcgaaggtggcggcgctgctgctcgggctgctcttggagtgcacagaagccaaaaagcattgctggtatttcgaaggactctatccaacctattatatatgccgctcctacgaggactgctgtggctccaggtgctgtgtgcgggccctctccatacagaggctgtggtacttctggttccttctgatgatgggcgtgcttttctgctgcggagccggcttcttcatccggaggcgcatgtaccccccgccgctgatcgaggagccagccttcaatgtgtcctacaccaggcagcccccaaatcccggcccaggagcccagcagccggggccgccctattacaccgacccaggaggaccggggatgaaccctgtcgggaattccatggcaatggctttccaggtcccacccaactcaccccaggggagtgtggcctgcccgccccctccagcctactgcaacacgcctccgcccccgtacgaacaggtagtgaaggccaagtag

SEQ ID NO: 72 - protein, 172 aa, Homo sapiens
MRRQPAKVAALLLGLLLECTEAKKHCWYFEGLYPTYYICRSYEDCCGSRCCVRALSIQRLWYFWFLLMMGVLFCCGAGFFIRRRMYPPPLIEEPAFNVSYTRQPPNPGPGAQQPGPPYYTDPGGPGMNPVGNSMAMAFQVPPNSPQGSVACPPPPAYCNTPPPPYEQVVKAK

SEQ ID NO: 73 - DNA, 256 bp, Homo sapiens
atgatgggcgtgcttttctgctgcggagccggcttcttcatccggaggcgcatgtaccccccgccgctgatcgaggagccagccttcaatgtgtcctacaccaggcagcccccaaatcccggcccaggagcccagcagccggggccgccctattacaccgacccaggaggaccggggatgaaccctgtcgggaattccatggcaatggctttccaggtcccacccaactcaccccaggggagtgtggcctgcccgc

SEQ ID NO: 74 - protein, 85 aa, Homo sapiens
MMGVLFCCGAGFFIRRRMYPPPLIEEPAFNVSYTRQPPNPGPGAQQPGPPYYTDPGGPGMNPVGNSMAMAFQVPPNSPQGSVACP

SEQ ID NO: 75 - DNA, 158 bp, Homo sapiens
atgatgggcgtgcttttctgctgcggagccggcttcttcatccggaggcgcatgtaccccccgccgctgatcgaggagccagccttcaatgtgtcctacaccaggcagcccccaaatcccggcccaggagcccagcagccggggccgccctattacac

SEQ ID NO: 76 - protein, 53 aa, Homo sapiens
MMGVLFCCGAGFFIRRRMYPPPLIEEPAFNVSYTRQPPNPGPGAQQPGPPYYT

SEQ ID NO: 77 - DNA, 468 bp, Homo sapiens
atgtgcacagaagccaaaaagcattgctggtatttcgaaggactctatccaacctattatatatgccgctcctacgaggactgctgtggctccaggtgctgtgtgcgggccctctccatacagaggctgtggtacttctggttccttctgatgatgggcgtgcttttctgctgcggagccggcttcttcatccggaggcgcatgtaccccccgccgctgatcgaggagccagccttcaatgtgtcctacaccaggcagcccccaaatcccggcccaggagcccagcagccggggccgccctattacaccgacccaggaggaccggggatgaaccctgtcgggaattccatggcaatggctttccaggtcccacccaactcaccccaggggagtgtggcctgcccgccccctccagcctactgcaacacgcctccgcccccgtacgaacaggtagtgaaggccaagtag

SEQ ID NO: 78 - protein, 155 aa, Homo sapiens
MCTEAKKHCWYFEGLYPTYYICRSYEDCCGSRCCVRALSIQRLWYFWFLLMMGVLFCCGAGFFIRRRMYPPPLIEEPAFNVSYTRQPPNPGPGAQQPGPPYYTDPGGPGMNPVGNSMAMAFQVPPNSPQGSVACPPPPAYCNTPPPPYEQVVKAK

SEQ ID NO: 79 - DNA, 513 bp, Homo sapiens
atgaggatcagaagtcttcatccagtacagcagactgaaccgactacttgcacagaagccaaaaagcattgctggtatttcgaaggactctatccaacctattatatatgccgctcctacgaggactgctgtggctccaggtgctgtgtgcgggccctctccatacagaggctgtggtacttctggttccttctgatgatgggcgtgcttttctgctgcggagccggcttcttcatccggaggcgcatgtaccccccgccgctgatcgaggagccagccttcaatgtgtcctacaccaggcagcccccaaatcccggcccaggagcccagcagccggggccgccctattacaccgacccaggaggaccggggatgaaccctgtcgggaattccatggcaatggctttccaggtcccacccaactcaccccaggggagtgtggcctgcccgccccctccagcctactgcaacacgcctccgcccccgtacgaacaggtagtgaaggccaagtag

SEQ ID NO: 80 - protein, 170 aa, Homo sapiens
MRIRSLHPVQQTEPTTCTEAKKHCWYFEGLYPTYYICRSYEDCCGSRCCVRALSIQRLWYFWFLLMMGVLFCCGAGFFIRRRMYPPPLIEEPAFNVSYTRQPPNPGPGAQQPGPPYYTDPGGPGMNPVGNSMAMAFQVPPNSPQGSVACPPPPAYCNTPPPPYEQVVKAK

SEQ ID NO: 81 - DNA, 318 bp, Homo sapiens
atgatgggcgtgcttttctgctgcggagccggcttcttcatccggaggcgcatgtaccccccgccgctgatcgaggagccagccttcaatgtgtcctacaccaggcagcccccaaatcccggcccaggagcccagcagccggggccgccctattacaccgacccaggaggaccggggatgaaccctgtcgggaattccatggcaatggctttccaggtcccacccaactcaccccaggggagtgtggcctgcccgccccctccagcctactgcaacacgcctccgcccccgtacgaacaggtagtgaaggccaagtag

SEQ ID NO: 82 - protein, 105 aa, Homo sapiens
MMGVLFCCGAGFFIRRRMYPPPLIEEPAFNVSYTRQPPNPGPGAQQPGPPYYTDPGGPGMNPVGNSMAMAFQVPPNSPQGSVACPPPPAYCNTPPPPYEQVVKAK

SEQ ID NO: 83 - DNA, 318 bp, Homo sapiens; identical to SEQ ID NO: 81

SEQ ID NO: 84 - protein, 105 aa, Homo sapiens; identical to SEQ ID NO: 82

SEQ ID NO: 85 - DNA, 492 bp, Homo sapiens
atgcgaaggacgggctcacatgctcagtgcacagaagccaaaaagcattgctggtatttcgaaggactctatccaacctattatatatgccgctcctacgaggactgctgtggctccaggtgctgtgtgcgggccctctccatacagaggctgtggtacttctggttccttctgatgatgggcgtgcttttctgctgcggagccggcttcttcatccggaggcgcatgtaccccccgccgctgatcgaggagccagccttcaatgtgtcctacaccaggcagcccccaaatcccggcccaggagcccagcagccggggccgccctattacaccgacccaggaggaccggggatgaaccctgtcgggaattccatggcaatggctttccaggtcccacccaactcaccccaggggagtgtggcctgcccgccccctccagcctactgcaacacgcctccgcccccgtacgaacaggtagtgaaggccaagtag

SEQ ID NO: 86 - protein, 163 aa, Homo sapiens
MRRTGSHAQCTEAKKHCWYFEGLYPTYYICRSYEDCCGSRCCVRALSIQRLWYFWFLLMMGVLFCCGAGFFIRRRMYPPPLIEEPAFNVSYTRQPPNPGPGAQQPGPPYYTDPGGPGMNPVGNSMAMAFQVPPNSPQGSVACPPPPAYCNTPPPPYEQVVKAK

SEQ ID NO: 87 - DNA, 65 bp, Homo sapiens
atgatgggcgtgcttttctgctgcggagccggcttcttcatccggaggcgcatgtaccccccgcc

SEQ ID NO: 88 - protein, 22 aa, Homo sapiens
MMGVLFCCGAGFFIRRRMYPPP

SEQ ID NO: 89 - DNA, 318 bp, Homo sapiens; identical to SEQ ID NO: 81

SEQ ID NO: 90 - protein, 105 aa, Homo sapiens; identical to SEQ ID NO: 82

SEQ ID NO: 91 - DNA, 330 bp, Homo sapiens
atgttccttctgatgatgggcgtgcttttctgctgcggagccggcttcttcatccggaggcgcatgtaccccccgccgctgatcgaggagccagccttcaatgtgtcctacaccaggcagcccccaaatcccggcccaggagcccagcagccggggccgccctattacaccgacccaggaggaccggggatgaaccctgtcgggaattccatggcaatggctttccaggtcccacccaactcaccccaggggagtgtggcctgcccgccccctccagcctactgcaacacgcctccgcccccgtacgaacaggtagtgaaggccaagtag

SEQ ID NO: 92 - protein, 109 aa, Homo sapiens
MFLLMMGVLFCCGAGFFIRRRMYPPPLIEEPAFNVSYTRQPPNPGPGAQQPGPPYYTDPGGPGMNPVGNSMAMAFQVPPNSPQGSVACPPPPAYCNTPPPPYEQVVKAK

SEQ ID NO: 93 - DNA, 288 bp, Homo sapiens
atgatgggcgtgcttttctgctgcggagccggcttcttcatccggaggcgcatgtaccccccgccgctgatcgaggagccagccttcaatgtgtcctacaccaggcagcccccaaatcccggcccaggagcccagcagccggggccgccctattacaccgacccaggaggaccggggatgaaccctgtcgggaattccatggcaatggctttccaggtcccacccaactcaccccaggggagtgtggcctgcccgccccctccagcctactgcaacacgcctccgccc

SEQ ID NO: 94 - protein, 96 aa, Homo sapiens
MMGVLFCCGAGFFIRRRMYPPPLIEEPAFNVSYTRQPPNPGPGAQQPGPPYYTDPGGPGMNPVGNSMAMAFQVPPNSPQGSVACPPPPAYCNTPPP

SEQ ID NO: 95 - DNA, 2076 bp, Homo sapiens
atggatgggtgcaaaaaagagctgccccgcttgcaagagccggaggaggacgaggattgttacatccttaatgttcagtcaagcagtgatgacaccagtgggtcttctgtggccagaagagctccgaagagacaggcgagttgcatccttaatgtccagtcaaggagtggtgacaccagtgggtcttctgtggccagaagagctccgaagagacaggcgagctccgtggtagtgattgactctgattctgatgaggaatgtcacacccatgaagagaagaaagctaagttattggaaataaacagcgacgatgagagtccggagtgttgtcatgtgaagcctgccatccaggaacctccaatagttattagtgatgatgacaatgacgatgacaacggtaatgatttggaagttcccgacgacaacagtgatgattcagaagctcccgacgacaacagtgatgattcggaagctcctgacgacaacagtgatgattcggaagctcccgacgacaacagtgatgattcggaagctcccgacgacaatagtgatgattcggatgttcccgacgacaacagtgatgattcatccgacgacaacagtgatgattcatccgacgacaacagtgatgattcggatgttcccgacgacaagagtgatgattcggatgttcccgacgacagcagtgatgattcggatgttcccgacgacagcagtgatgattcggaagctcccgacgacagcagtgatgattcggaagctcccgacgacagcagtgatgattcggaagctcccgacgacagcagtgatgattcggaagctcccgacgacagcagtgatgattcggaagcttccgacgacagcagtgatgattcggaagcttccgacgacagcagtgatgattcggaagctcccgacgacaagagtgatgattcggatgttcccgaagacaagagtgatgattcggatgttcccgatgacaatagtgatgatttggaagttcctgtgccagcagaagatttgtgtaatgaaggccaaattgcttcagatgaagaagagctggttgaggctgctgctgctgtctcccagcatgattcatctgatgatgctggtgagcaggatcttggtgagaatctcagcaaaccaccaagtgatcctgaggctaaccctgaagtttcagagagaaagctgccaactgaggaagagcctgcacctgtggtggaacaatcagggaaaaggaagtcaaaaaccaaaactattgtggagccaccgaggaaaaggcagacaaagaccaaaaatatagtggagccaccaaggaaaaggcagacaaagaccaaaaatatagtggagccactgaggaagaggaaggcgaaaaccaaaaatgtatctgtgacacctggacataagaagcgtgggccttcaaagaagaaacccggtgcagcaaaagttgaaaaacgcaagactaggactcctaaatgcaaagtccctggatgtttcttgcaagaccttgaaaagtcaaagaaatactctggaaaaaatttaaagcgaaataaggatgaattggttcagagaatctacgacctgtttaacagatccgtctgtgataaaaagctgccagagaaactacgcataggctggaataacaagatggtgaaaactgctggcttatgcagcactggtgagatgtggtacccaaagtggcggcgctttgccaagatccagattggcttgaaagtctgcgactctgcagaccgaatccgggataccttgatccatgaaatgtgccatgctgcctcctggctgattgatggtatccatgattctcatggtgacgcatggaagtattatgccaggaaatccaacaggatacacccggagctgcccagggtcacccgttgccataactataagattaactacaaggtccattatgaatgtactggatgcaaaacgaggattggctgctacaccaaatcgttggacaccagccgcttcatctgtgccaaatgcaaggggtctctggtcatggtgccattaactcagaaagatgggacccgtattgtgccccacgtgtga

SEQ ID NO: 96 - protein, 691 aa, Homo sapiens
MDGCKKELPRLQEPEEDEDCYILNVQSSSDDTSGSSVARRAPKRQASCILNVQSRSGDTSGSSVARRAPKRQASSVVVIDSDSDEECHTHEEKKAKLLEINSDDESPECCHVKPAIQEPPIVISDDDNDDDNGNDLEVPDDNSDDSEAPDDNSDDSEAPDDNSDDSEAPDDNSDDSEAPDDNSDDSDVPDDNSDDSSDDNSDDSSDDNSDDSDVPDDKSDDSDVPDDSSDDSDVPDDSSDDSEAPDDSSDDSEAPDDSSDDSEAPDDSSDDSEAPDDSSDDSEASDDSSDDSEASDDSSDDSEAPDDKSDDSDVPEDKSDDSDVPDDNSDDLEVPVPAEDLCNEGQIASDEEELVEAAAAVSQHDSSDDAGEQDLGENLSKPPSDPEANPEVSERKLPTEEEPAPVVEQSGKRKSKTKTIVEPPRKRQTKTKNIVEPPRKRQTKTKNIVEPLRKRKAKTKNVSVTPGHKKRGPSKKKPGAAKVEKRKTRTPKCKVPGCFLQDLEKSKKYSGKNLKRNKDELVQRIYDLFNRSVCDKKLPEKLRIGWNNKMVKTAGLCSTGEMWYPKWRRFAKIQIGLKVCDSADRIRDTLIHEMCHAASWLIDGIHDSHGDAWKYYARKSNRIHPELPRVTRCHNYKINYKVHYECTGCKTRIGCYTKSLDTSRFICAKCKGSLVMVPLTQKDGTRIVPHV

SEQ ID NO: 97 - DNA, 2076 bp, Homo sapiens; identical to SEQ ID NO: 95

SEQ ID NO: 98 - protein, 691 aa, Homo sapiens; identical to SEQ ID NO: 96

SEQ ID NO: 99 - DNA, 1812 bp, Homo sapiens
atgaggcggaaggagaagcggctcctgcaggcggtggcgctggtgctggcggccctggtcctcctgcccaacgtggggctttgggcgctgtaccgcgagcggcagcccgacggcacccctgggggatcgggggcggcggtggcgccggcggcgggacagggctcacacagtcgacaaaagaaaacgtttttcttgggagatgggcagaagctgaaggactggcatgacaaggaggccatccggagggacgctcagcgcgtaggaaatggagaacaaggaagaccttaccccatgaccgatgctgagagagtggatcaggcataccgagaaaatggatttaacatctacgtcagtgataaaatctccttgaatcgctctctcccagatatccggcacccaaactgcaacagcaagcgctacctggagacacttcccaacacaagcatcatcatccccttccacaacgagggctggtcctccctcctccgcaccgtccacagtgtgctcaatcgctcgcctccagagctggtcgccgagattgtactggtcgacgacttcagtgatcgagagcacctgaagaagcctcttgaagactacatggcccttttccccagtgtgaggattcttcgaaccaagaaacgggaagggctgataaggacccgaatgctgggggcctcagtggcaactggggatgtcatcacattcttggattcacactgtgaagccaatgtcaactggcttccccccttgcttgaccgcattgctcggaaccgcaagaccattgtgtgcccgatgattgatgtaattgaccatgacgactttcggtacgagacacaggcaggggatgccatgcggggagcctttgactgggagatgtactacaagcggatcccgatccctccagaactgcagaaagctgaccccagcgacccatttgagtctcccgtgatggccggtggactgttcgccgtggatcggaagtggttctgggaactcggcgggtatgacccaggcttggagatctggggaggggagcagtatgaaatctccttcaaggtgtggatgtgtgggggccgcatggaggacatcccctgctccagggtgggccatatctacaggaagtatgtgccctacaaggtcccggccggagtcagcctggcccggaaccttaagcgggtggccgaagtgtggatggatgagtacgcagagtacatttaccagcgccggcctgaataccgccacctctccgctggggatgtcgcagtccagaaaaagctccgcagctcccttaactgcaagagtttcaagtggtttatgacgaagatagcctgggacctgcccaaattctacccacccgtggagcccccggctgcagcttggggggagatccgaaatgtgggcacagggctgtgtgcagacacaaagcacggggccttgggctccccactaaggctagagggctgcgtccgaggccgtggggaggctgcctggaacaacatgcaggtattcaccttcacctggagagaggacatccggcctggagacccccagcacaccaagaagttctgctttgatgccatttcccacaccagccctgtcacgctgtacgactgccacagcatgaagggcaaccagctgtggaaataccgcaaagacaagaccctgtaccaccctgtcagtggcagctgcatggactgcagtgaaagtgaccataggatcttcatgaacacctgcaacccatcctctctcacccagcagtggctgtttgaacacaccaactcaacagtcttggaaaaattcaataggaactga

SEQ ID NO: 100 - protein, 603 aa, Homo sapiens
MRRKEKRLLQAVALVLAALVLLPNVGLWALYRERQPDGTPGGSGAAVAPAAGQGSHSRQKKTFFLGDGQKLKDWHDKEAIRRDAQRVGNGEQGRPYPMTDAERVDQAYRENGFNIYVSDKISLNRSLPDIRHPNCNSKRYLETLPNTSIIIPFHNEGWSSLLRTVHSVLNRSPPELVAEIVLVDDFSDREHLKKPLEDYMALFPSVRILRTKKREGLIRTRMLGASVATGDVITFLDSHCEANVNWLPPLLDRIARNRKTIVCPMIDVIDHDDFRYETQAGDAMRGAFDWEMYYKRIPIPPELQKADPSDPFESPVMAGGLFAVDRKWFWELGGYDPGLEIWGGEQYEISFKVWMCGGRMEDIPCSRVGHIYRKYVPYKVPAGVSLARNLKRVAEVWMDEYAEYIYQRRPEYRHLSAGDVAVQKKLRSSLNCKSFKWFMTKIAWDLPKFYPPVEPPAAAWGEIRNVGTGLCADTKHGALGSPLRLEGCVRGRGEAAWNNMQVFTFTWREDIRPGDPQHTKKFCFDAISHTSPVTLYDCHSMKGNQLWKYRKDKTLYHPVSGSCMDCSESDHRIFMNTCNPSSLTQQWLFEHTNSTVLEKFNRN

SEQ ID NO: 101 - DNA, 1626 bp, Homo sapiens
atgaggcggaaggagaagcggctcctgcaggcggtggcgctggtgctggcggccctggtcctcctgcccaacgtggggctttgggcgctgtaccgcgagcggcagcccgacggcacccctgggggatcgggggcggcggtggcgccggcggcgggacagggctcacacagtcgacaaaagaaaacgtttttcttgggagatgggcagaagctgaaggactggcatgacaaggaggccatccggagggacgctcagcgcgtaggaaatggagaacaaggaagaccttaccccatgaccgatgctgagagagtggatcaggcataccgagaaaatggatttaacatctacgtcagtgataaaatctccttgaatcgctctctcccagatatccggcacccaaactgcaacagcaagcgctacctggagacacttcccaacacaagcatcatcatccccttccacaacgagggctggtcctccctcctccgcaccgtccacagtgtgctcaatcgctcgcctccagagctggtcgccgagattgtactggtcgacgacttcagtgatcgagaccgcattgctcggaaccgcaagaccattgtgtgcccgatgattgatgtaattgaccatgacgactttcggtacgagacacaggcaggggatgccatgcggggagcctttgactgggagatgtactacaagcggatcccgatccctccagaactgcagaaagctgaccccagcgacccatttgagtctcccgtgatggccggtggactgttcgccgtggatcggaagtggttctgggaactcggcgggtatgacccaggcttggagatctggggaggggagcagtatgaaatctccttcaaggtgtggatgtgtgggggccgcatggaggacatcccctgctccagggtgggccatatctacaggaagtatgtgccctacaaggtcccggccggagtcagcctggcccggaaccttaagcgggtggccgaagtgtggatggatgagtacgcagagtacatttaccagcgccggcctgaataccgccacctctccgctggggatgtcgcagtccagaaaaagctccgcagctcccttaactgcaagagtttcaagtggtttatgacgaagatagcctgggacctgcccaaattctacccacccgtggagcccccggctgcagcttggggggagatccgaaatgtgggcacagggctgtgtgcagacacaaagcacggggccttgggctccccactaaggctagagggctgcgtccgaggccgtggggaggctgcctggaacaacatgcaggtattcaccttcacctggagagaggacatccggcctggagacccccagcacaccaagaagttctgctttgatgccatttcccacaccagccctgtcacgctgtacgactgccacagcatgaagggcaaccagctgtggaaataccgcaaagacaagaccctgtaccaccctgtcagtggcagctgcatggactgcagtgaaagtgaccataggatcttcatgaacacctgcaacccatcctctctcacccagcagtggctgtttgaacacaccaactcaacagtcttggaaaaattcaataggaactga

SEQ ID NO: 102 - protein, 541 aa, Homo sapiens
MRRKEKRLLQAVALVLAALVLLPNVGLWALYRERQPDGTPGGSGAAVAPAAGQGSHSRQKKTFFLGDGQKLKDWHDKEAIRRDAQRVGNGEQGRPYPMTDAERVDQAYRENGFNIYVSDKISLNRSLPDIRHPNCNSKRYLETLPNTSIIIPFHNEGWSSLLRTVHSVLNRSPPELVAEIVLVDDFSDRDRIARNRKTIVCPMIDVIDHDDFRYETQAGDAMRGAFDWEMYYKRIPIPPELQKADPSDPFESPVMAGGLFAVDRKWFWELGGYDPGLEIWGGEQYEISFKVWMCGGRMEDIPCSRVGHIYRKYVPYKVPAGVSLARNLKRVAEVWMDEYAEYIYQRRPEYRHLSAGDVAVQKKLRSSLNCKSFKWFMTKIAWDLPKFYPPVEPPAAAWGEIRNVGTGLCADTKHGALGSPLRLEGCVRGRGEAAWNNMQVFTFTWREDIRPGDPQHTKKFCFDAISHTSPVTLYDCHSMKGNQLWKYRKDKTLYHPVSGSCMDCSESDHRIFMNTCNPSSLTQQWLFEHTNSTVLEKFNRN

SEQ ID NO: 103 - DNA, 1023 bp, Homo sapiens
atggaggatgctcactgcacttggctttcgttacctggtctgcccccgggctgggccttgtttgccgtcctcgacggccacggtggggctcgagctgcccgcttcggtgcacgccatttgccaggccatgtgctccaggagctgggcccggagcctagcgagcccgagggcgtgcgcgaggcgctgcgccgagccttcttgagcgccgacgagcgcctgcgctccctctggccccgcgtggaaacgggcggctgcacggccgtggtgttgctggtctccccgcggtttctgtacctggcgcactgcggtgactcccgcgcggtgctgagccgcgctggcgccgtggccttcagcacagaggaccaccggccccttcgaccccgggaacgcgagcgcatccacgccgctggcggcaccatccgccgccgccgcgtcgagggctctctggccgtgtcgcgagcgttgggcgactttacctacaaggaggctccggggaggccccccgagctacagctcgtttctgcggagccagaggtggccgcactggcacgccaggctgaggacgagttcatgctcctggcctctgatggcgtctgggacactgtgtctggtgctgccctggcgggactggtggcttcacgcctccgcttgggcctggccccagagcttctctgcgcgcagctgttggacacgtgtctgtgcaaggtcctgggggcgtggcgtggtacctttggggcttggtgcagcagagggagagagcctcggggttttggggaggagggctttgatagagaggcaagagtaaagctagcaaaggaggggataggactcaagcgaagggcgtggcctgaagtgggcagggccaaaatacaggggcggagcctgagggatgctttgaggcacgggagagttagtggaagggacttaagagaaagggcgtggtcttttggaaaggggcgattctgggtcgtaggagccgggccggaagtattgattagtgctggaaggtggaagagcaggtaa

SEQ ID NO: 104 - protein, 340 aa, Homo sapiens
MEDAHCTWLSLPGLPPGWALFAVLDGHGGARAARFGARHLPGHVLQELGPEPSEPEGVREALRRAFLSADERLRSLWPRVETGGCTAVVLLVSPRFLYLAHCGDSRAVLSRAGAVAFSTEDHRPLRPRERERIHAAGGTIRRRRVEGSLAVSRALGDFTYKEAPGRPPELQLVSAEPEVAALARQAEDEFMLLASDGVWDTVSGAALAGLVASRLRLGLAPELLCAQLLDTCLCKVLGAWRGTFGAWCSRGREPRGFGEEGFDREARVKLAKEGIGLKRRAWPEVGRAKIQGRSLRDALRHGRVSGRDLRERAWSFGKGRFWVVGAGPEVLISAGRWKSR

SEQ ID NO: 105 - DNA, 1293 bp, Homo sapiens
atggcggtcctggcccgccagctgcagcgtctcctctggaccgcttgcaagaaaaaggagagggagaaggaggggagggaggaagaggaggaggaggaggcggggcgcagggcccccgaagggcctcggtctctgttgacagcgccgcgccgcgcccagcggccgcacgggggtgccgaggcgtctgggggcctgcgcttcggggcgagcgcagcgcaaggctggcgcgcgcgcatggaggatgctcactgcacttggctttcgttacctggtctgcccccgggctgggccttgtttgccgtcctcgacggccacggtggggctcgagctgcccgcttcggtgcacgccatttgccaggccatgtgctccaggagctgggcccggagcctagcgagcccgagggcgtgcgcgaggcgctgcgccgagccttcttgagcgccgacgagcgcctgcgctccctctggccccgcgtggaaacgggcggctgcacggccgtggtgttgctggtctccccgcggtttctgtacctggcgcactgcggtgactcccgcgcggtgctgagccgcgctggcgccgtggccttcagcacagaggaccaccggccccttcgaccccgggaacgcgagcgcatccacgccgctggcggcaccatccgccgccgccgcgtcgagggctctctggccgtgtcgcgagcgttgggcgactttacctacaaggaggctccggggaggccccccgagctacagctcgtttctgcggagccagaggtggccgcactggcacgccaggctgaggacgagttcatgctcctggcctctgatggcgtctgggacactgtgtctggtgctgccctggcgggactggtggcttcacgcctccgcttgggcctggccccagagcttctctgcgcgcagctgttggacacgtgtctgtgcaagggcagcctggacaacatgacctgcatcctggtctgcttccctggggcccctaggccttctgaggaggcgatcaggagggagctagcactggacgcagccctgggctgcagaatcgctgaactgtgtgcctctgctcagaagccccccagcctgaacacagttttcaggactctggcctcagaggacatcccagatttacctcctgggggagggctggactgcaaggccactgtcattgctgaagtttattctcagatctgccaggtctcagaagagtgcggagagaaggggcaggatggggctgggaagtccaaccccacgcatttgggctcagccttggacatggaggcctga

SEQ ID NO: 106 - protein, 430 aa, Homo sapiens
MAVLARQLQRLLWTACKKKEREKEGREEEEEEEAGRRAPEGPRSLLTAPRRAQRPHGGAEASGGLRFGASAAQGWRARMEDAHCTWLSLPGLPPGWALFAVLDGHGGARAARFGARHLPGHVLQELGPEPSEPEGVREALRRAFLSADERLRSLWPRVETGGCTAVVLLVSPRFLYLAHCGDSRAVLSRAGAVAFSTEDHRPLRPRERERIHAAGGTIRRRRVEGSLAVSRALGDFTYKEAPGRPPELQLVSAEPEVAALARQAEDEFMLLASDGVWDTVSGAALAGLVASRLRLGLAPELLCAQLLDTCLCKGSLDNMTCILVCFPGAPRPSEEAIRRELALDAALGCRIAELCASAQKPPSLNTVFRTLASEDIPDLPPGGGLDCKATVIAEVYSQICQVSEECGEKGQDGAGKSNPTHLGSALDMEA

SEQ ID NO: 107 - DNA, 339 bp, Homo sapiens
atgacctgcatcctggtctgcttccctggggcccctaggccttctgaggaggcgatcaggagggagctagcactggacgcagccctgggctgcagaatcgctgaactgtgtgcctctgctcagaagccccccagcctgaacacagttttcaggactctggcctcagaggacatcccagatttacctcctgggggagggctggactgcaaggccactgtcattgctgaagtttattctcagatctgccaggtctcagaagagtgcggagagaaggggcaggatggggctgggaagtccaaccccacgcatttgggctcagccttggacatggaggcctga

SEQ ID NO: 108 - protein, 112 aa, Homo sapiens
MTCILVCFPGAPRPSEEAIRRELALDAALGCRIAELCASAQKPPSLNTVFRTLASEDIPDLPPGGGLDCKATVIAEVYSQICQVSEECGEKGQDGAGKSNPTHLGSALDMEA

SEQ ID NO: 109 - DNA, 414 bp, Homo sapiens
atgacctgcatcctggtctgcttccctggggcccctaggccttctgaggaggcgatcaggagggagctagcactggacgcagccctgggctgcagaatcgctgaactgtgtgcctctgctcagaagccccccagcctgaacacagttttcaggactctggcctcagaggacatcccagatttacctcctgggggagggctggactgcaagtctcagaagagtgcggagagaaggggcaggatggggctgggaagtccaaccccacgcatttgggctcagccttggacatggaggcctgacagctgttgtcctttggggatcctttgcttctctggggcctcaacagaactaaagaagaaaaccgaccctttccccaactacatgtaccagcggaaggaaggaaggccaatgtag

SEQ ID NO: 110 - protein, 137 aa, Homo sapiens
MTCILVCFPGAPRPSEEAIRRELALDAALGCRIAELCASAQKPPSLNTVFRTLASEDIPDLPPGGGLDCKSQKSAERRGRMGLGSPTPRIWAQPWTWRPDSCCPLGILCFSGASTELKKKTDPFPNYMYQRKEGRPM

SEQ ID NO: 111 - DNA, 339 bp, Homo sapiens; identical to SEQ ID NO: 107

SEQ ID NO: 112 - protein, 112 aa, Homo sapiens; identical to SEQ ID NO: 108

SEQ ID NO: 113 - DNA, 423 bp, Homo sapiens
atgacctgcatcctggtctgcttccctggggcccctaggccttctgaggaggcgatcaggagggagctagcactggacgcagccctgggctgcagaatcgctgaactgtgtgcctctgctcagaagccccccagcctgaacacagttttcaggactctggcctcagaggacatcccagatttacctcctgggggagggctggactgcaaatctgccaggtctcagaagagtgcggagagaaggggcaggatggggctgggaagtccaaccccacgcatttgggctcagccttggacatggaggcctgacagctgttgtcctttggggatcctttgcttctctggggcctcaacagaactaaagaagaaaaccgaccctttccccaactacatgtaccagcggaaggaaggaaggccaatgtag

SEQ ID NO: 114 - protein, 140 aa, Homo sapiens
MTCILVCFPGAPRPSEEAIRRELALDAALGCRIAELCASAQKPPSLNTVFRTLASEDIPDLPPGGGLDCKSARSQKSAERRGRMGLGSPTPRIWAQPWTWRPDSCCPLGILCFSGASTELKKKTDPFPNYMYQRKEGRPM

SEQ ID NO: 115 - DNA, 339 bp, Homo sapiens; identical to SEQ ID NO: 107

SEQ ID NO: 116 - protein, 112 aa, Homo sapiens; identical to SEQ ID NO: 108

SEQ ID NO: 117 - DNA, 207 bp, Homo sapiens
atgacctgcatcctggtctgcttccctggggcccctaggccttctgaggaggcgatcaggagggagctagcactggacgcagccctgggctgcagaatcgctgaactgtgtgcctctgctcagaagccccccagcctgaacacagttttcaggactctggcctcagaggacatcccagatttacctcctgggggagggctggactaa

SEQ ID NO: 118 - protein, 68 aa, Homo sapiens
MTCILVCFPGAPRPSEEAIRRELALDAALGCRIAELCASAQKPPSLNTVFRTLASEDIPDLPPGGGLD

SEQ ID NO: 119 - DNA, 423 bp, Homo sapiens; identical to SEQ ID NO: 113

SEQ ID NO: 120 - protein, 140 aa, Homo sapiens; identical to SEQ ID NO: 114

SEQ ID NO: 121 - DNA, 414 bp, Homo sapiens; identical to SEQ ID NO: 109

SEQ ID NO: 122 - protein, 137 aa, Homo sapiens; identical to SEQ ID NO: 110

SEQ ID NO: 123 - DNA, 387 bp, Homo sapiens
atgacctgcatcctggtctgcttccctggggcccctaggccttctgaggaggcgatcaggagggagctagcactggacgcagccctgggctgcagaatcgctgaactgtgtgcctctgctcagaagccccccagcctgaacacagttttcaggactctggcctcagaggacatcccagatttacctcctgggggagggctggactgcaaaaggggcaggatggggctgggaagtccaaccccacgcatttgggctcagccttggacatggaggcctgacagctgttgtcctttggggatcctttgcttctctggggcctcaacagaactaaagaagaaaaccgaccctttccccaactacatgtaccagcggaaggaaggaaggcca

SEQ ID NO: 124 - protein, 129 aa, Homo sapiens
MTCILVCFPGAPRPSEEAIRRELALDAALGCRIAELCASAQKPPSLNTVFRTLASEDIPDLPPGGGLDCKRGRMGLGSPTPRIWAQPWTWRPDSCCPLGILCFSGASTELKKKTDPFPNYMYQRKEGRP

SEQ ID NO: 125 - DNA, 5430 bp, Homo sapiens
atggccgccttcgggcttctcagctatgagcagagaccgctgaagcgcccccggctcgggccgcccgacgtctacccacaggaccccaagcagaaggaggatgaacttactgctgtgaatgtaaagcaaggcttcaataatcagccagccttcactggagatgaacatggctcagccagaaatattgtaattaacccatcaaagattggagcttattttagcagcatattagctgagaaactgaagcttaacactttccaggacacgggaaagaagaaaccacaagttaatgctaaagataattattggctggttactgctcgatcccagagtgcaattcatagttggttttctgacttagcaggaaataagccactttctattttggcaaaaaaggttcctatccttagtaaaaaagaggatgtttttgcatatttagctaaatattctgtgccaatggttcgagcaacgtggctgatcaagatgacttgtgcctattattctgctatatctgaagctaaaattaagaaacgtcaggctcctgatccgaatttggagtggacacagatatctaccagatatcttcgagagcagttggccaagatttctgacttttaccacatggcctccagcacgggcgatggccctgtccctgtgccaccagaggtggagcaagccatgaagcaatgggaatacaacgaaaagctagcatttcacatgttccaggaaggaatgttagaaaaacacgaatatttgacatggatcctggatgttttagaaaagatcagaccaatggatgatgatcttcttaaactcttgctaccactaatgctgcaggttcgggcaaggatttatgaagtagaacaacagataaaacaaagaggccgtgcagtggaagttcggtggtcatttgacaagtgccaagaatccacagcaggggtgactattagtcgggttttgcacacgttggaagttttggatcgtcactgttttgaccgaactgattccagcaattccatggagacactttatcataagattttctgggcaaaccaaaacaaagataaccaagaggttgcgcccaacgatgaagctgtggtgacgctgttatgtgaatgggccgtgagctgcaaacggtctggcaagcacagggccatggctgtggcaaaactcctggagaagaggcaagcagaaattgaggcagagagatgtggtgaatcagaagtcttagatgagaaggagtctatttcttcatcctctcttgctggatccagtttgcctgttttccagaatgtgctgttaaggtttttagatacacaggccccctctttgtcggacccaaacagtgaatgtgaaaaggtggaatttgtgaacctggtgctgctcttctgcgagttcatccgccatgatgtcttctcccatgacgcatacatgtgtaccctcatatctcgaggagatttgtcagtcactgcctcaactcggccgcggtcaccagtaggggaaaatgcagatgaacactattcaaaggaccatgatgtgaaaatggagattttttctcctatgcctggagaatcctgtgagaatgccaacacttcgttgggcagaagaatgtcagttaattgtgagaagttggtgaagagggaaaagccaagggaattaatttttccatctaattatgacctccttcgccacttacagtatgcaacacattttcctatacctctggatgaatcttcaagtcatgaatgtaaccagcgcacaatccttctctatggagtcggcaaagagcgtgatgaagcaaggcatcagctgaagaagattaccaaagatatcctgaaaattctaaataagaagagcaccacagagacaggggttggggacgaaggacaaaaagccaggaagaacaaacaggagacatttccaacactggagactgtgttcactaaactccagctcctttcatattttgatcaacatcaagtgacatctcagatttctaacaatgtgctagaacaaatcacaagctttgcgtcaggaacatcctatcatctccctttggctcaccacattcagctcatctttgatctcatggagccagcactgaacatcaacggactaattgacttcgcaatacagttactaaatgaactgagtgttgtggaagctgaactgctcctaaaatcctccagcctggcaggaagttatacaacaggactgtgtgtctgcatcgtggctgttctcaggcgctatcacagttgtctaatcttgaatcctgatcagacagcccaggtgtttgaagggttgtgtggtgtggtcaagcatgtcgtaaacccctcagaatgttcttcccctgaaagatgcattttagcctacctctatgatctctatgtgtcatgtagccacctcagaagtaaatttggagacctcttcagtagtgcctgttcaaaagtaaagcaaaccatatataataacgtgatgcctgcaaattcgaacttgcgatgggatccagacttcatgatggattttattgagaatccctcagcccgcagcatcaactactcaatgctgggcaagatcctcagtgacaatgcggccaatcgctacagctttgtctgcaatacactcatgaatgtatgtatgggccatcaggatgctggcaggattaacgacatagccaatttctcctctgagcttacggcttgctgcactgttcttagttcagaatggctgggggttctgaaggctctttgttgttcttcaaatcacgtgtgggggtttaatgatgtactttgcactgtagatgtgagtgacctttcattccatgattcattagctactttcattgctattctgatagcacgacagtgtttttccctggaggacgtcgtgcagcatgtcgcacttccctctcttctagcagcagcttgtggggatgcggacgccgagcctggggcgagaatgacatgccgactcttgcttcatctcttccgagctccccaggcctgcttcttacctcaagcaacgggcaaacctttccctggaataagatcatcttgtgatagacacctcttagccgctgctcacaacagcattgaagtgggagccgtgtttgctgtcttaaaagcaattatgatgcttggagatgccaaaattggcaataacagtgtcagctctttaaagaatgatgacttcaccatgagaggtttgcgatgtgatgggaatgctgatgatatctggactgcctcacaaaatccaaaatcctgtgggaaaagcatttccatagaaactgccaatttaagagaatacgctagatatgtactgaggactatctgtcaacaggaatgggtaggagagcattgcttaaaagaacctgaaagattatgtacagacaaagaacttatattggaccctgtgctttcaaatatgcaagcacagaaattactgcagcttatctgttatcctcatggcattaaagaatgtaccgagggggacaatctgcaaagacagcacattaagcgtattcttcagaatcttgagcagtggacactgaggcaatcctggttagaactccagctaatgatcaaacagtgcttgaaggaccctggctctggttctgtggccgaaatgaacaacttactggacaatattgcaaaggcaacaatagaggtattccagcagtctgcagacctaaataattcttctaattctggcatgagcctcttcaacccaaacagtattggaagtgctgatacaagtagcacgagacagaatggaataaagacattcctaagttcctccgaacgcaggggtgtatggttggtggcccccctcatcgccaggttgccaacttctgtgcaaggaagagtgctgaaagccgctggggaagagctggagaagggacagcacttgggttcttcttccaaaaaggaaagggacagacagaaacagaaaagtatgtctcttttgagtcaacaacccttcctctcactggtacttacctgccttaagggacaagatgaacaaagggaaggcctcctaacatctctccagaatcaagttaaccagattttaagtaactggagagaagaacgataccaagatgacataaaagcgcggcagatgatgcacgaagcattgcaactccgcctaaatttggtaggaggaatgtttgacacggtgcagaggagcacccagtggactacagactgggccctgctactccttcagatcattacttcaggaactgttgacatgcacactaacaatgaattattcacaacagttcttgacatgctgggtgttttaatcaatggaacgttagcctctgacctatcaaatgcatcccctgggggatctgaagagaacaagcgtgcatacatgaatttagtaaagaaactgaaaaaagagctaggagacaagcgatcagaaagtattgacaaagttcgacagttactacctttgccgaaacagacatgtgatgtcatcacttgtgaacctatgggttccttgattgacacaaaaggaaacaaaattgctggatttgactctatagataaaaaacagggtctccaggtctctacgaagcagaaggtgtccccgtgggacttgtttgagggtcagaagaacccagctcctttgtcctgggcctggtttgggacagtccgagtggaccgaagagtgatcaagtacgaggagcagcatcacctcctgctgtatcacacacaccccatgcccaagccccgcagttactacctccagccactgcccctgcctcctgaggaggaagaggaagagcccacatctccagtttctcaggaaccagaaaggaagtccgctgagctgtcagatcagggaaaaaccacaacagatgaagaaaagaaaacaaaaggaaggaagcgcaagacgaaatctagctcaagagttgatgaatatccacagagcaacatataccgagtgcctcctaattactcgcctatctcctcccaaatgatgcaccatccacagtccaccttgtggggttacaacctcgtgggccagccccagcagcccggctttttccttcagaaccaatctcttactccaggtggctccagattggaccctgcaggctcctttgtcccaaccaacaccaaacaagctctgtcaaacatgctacagcggcgctcaggcgccatgatgcagccgccttctcttcatgcaatcacatcgcagcagcagttgatacagatgaagcttctgcagcagcagcagcaacagcgacttctcaggcaagcccagactcggcctttccaacagtttcccaggcaaggcttgcagcagacccagcagcagcagcagacggccgccttggtgcggcagctccagaagcagctttccagcaaccagccacagcaaggagtgactccgtatgggcatccttcacacttctga

SEQ ID NO: 126 - protein, 1809 aa, Homo sapiens
MAAFGLLSYEQRPLKRPRLGPPDVYPQDPKQKEDELTAVNVKQGFNNQPAFTGDEHGSARNIVINPSKIGAYFSSILAEKLKLNTFQDTGKKKPQVNAKDNYWLVTARSQSAIHSWFSDLAGNKPLSILAKKVPILSKKEDVFAYLAKYSVPMVRATWLIKMTCAYYSAISEAKIKKRQAPDPNLEWTQISTRYLREQLAKISDFYHMASSTGDGPVPVPPEVEQAMKQWEYNEKLAFHMFQEGMLEKHEYLTWILDVLEKIRPMDDDLLKLLLPLMLQVRARIYEVEQQIKQRGRAVEVRWSFDKCQESTAGVTISRVLHTLEVLDRHCFDRTDSSNSMETLYHKIFWANQNKDNQEVAPNDEAVVTLLCEWAVSCKRSGKHRAMAVAKLLEKRQAEIEAERCGESEVLDEKESISSSSLAGSSLPVFQNVLLRFLDTQAPSLSDPNSECEKVEFVNLVLLFCEFIRHDVFSHDAYMCTLISRGDLSVTASTRPRSPVGENADEHYSKDHDVKMEIFSPMPGESCENANTSLGRRMSVNCEKLVKREKPRELIFPSNYDLLRHLQYATHFPIPLDESSSHECNQRTILLYGVGKERDEARHQLKKITKDILKILNKKSTTETGVGDEGQKARKNKQETFPTLETVFTKLQLLSYFDQHQVTSQISNNVLEQITSFASGTSYHLPLAHHIQLIFDLMEPALNINGLIDFAIQLLNELSVVEAELLLKSSSLAGSYTTGLCVCIVAVLRRYHSCLILNPDQTAQVFEGLCGVVKHVVNPSECSSPERCILAYLYDLYVSCSHLRSKFGDLFSSACSKVKQTIYNNVMPANSNLRWDPDFMMDFIENPSARSINYSMLGKILSDNAANRYSFVCNTLMNVCMGHQDAGRINDIANFSSELTACCTVLSSEWLGVLKALCCSSNHVWGFNDVLCTVDVSDLSFHDSLATFIAILIARQCFSLEDVVQHVALPSLLAAACGDADAEPGARMTCRLLLHLFRAPQACFLPQATGKPFPGIRSSCDRHLLAAAHNSIEVGAVFAVLKAIMMLGDAKIGNNSVSSLKNDDFTMRGLRCDGNADDIWTASQNPKSCGKSISIETANLREYARYVLRTICQQEWVGEHCLKEPERLCTDKELILDPVLSNMQAQKLLQLICYPHGIKECTEGDNLQRQHIKRILQNLEQWTLRQSWLELQLMIKQCLKDPGSGSVAEMNNLLDNIAKATIEVFQQSADLNNSSNSGMSLFNPNSIGSADTSSTRQNGIKTFLSSSERRGVWLVAPLIARLPTSVQGRVLKAAGEELEKGQHLGSSSKKERDRQKQKSMSLLSQQPFLSLVLTCLKGQDEQREGLLTSLQNQVNQILSNWREERYQDDIKARQMMHEALQLRLNLVGGMFDTVQRSTQWTTDWALLLLQIITSGTVDMHTNNELFTTVLDMLGVLINGTLASDLSNASPGGSEENKRAYMNLVKKLKKELGDKRSESIDKVRQLLPLPKQTCDVITCEPMGSLIDTKGNKIAGFDSIDKKQGLQVSTKQKVSPWDLFEGQKNPAPLSWAWFGTVRVDRRVIKYEEQHHLLLYHTHPMPKPRSYYLQPLPLPPEEEEEEPTSPVSQEPERKSAELSDQGKTTTDEEKKTKGRKRKTKSSSRVDEYPQSNIYRVPPNYSPISSQMMHHPQSTLWGYNLVGQPQQPGFFLQNQSLTPGGSRLDPAGSFVPTNTKQALSNMLQRRSGAMMQPPSLHAITSQQQLIQMKLLQQQQQQRLLRQAQTRPFQQFPRQGLQQTQQQQQTAALVRQLQKQLSSNQPQQGVTPYGHPSHF

SEQ ID NO: 127 - DNA, 6438 bp, Homo sapiens
atggccgccttcgggcttctcagctatgagcagagaccgctgaagcgcccccggctcgggccgcccgacgtctacccacaggaccccaagcagaaggaggatgaacttactgctgtgaatgtaaagcaaggcttcaataatcagccagccttcactggagatgaacatggctcagccagaaatattgtaattaacccatcaaagattggagcttattttagcagcatattagctgagaaactgaagcttaacactttccaggacacgggaaagaagaaaccacaagttaatgctaaagataattattggctggttactgctcgatcccagagtgcaattcatagttggttttctgacttagcaggaaataagccactttctattttggcaaaaaaggttcctatccttagtaaaaaagaggatgtttttgcatatttagctaaatattctgtgccaatggttcgagcaacgtggctgatcaagatgacttgtgcctattattctgctatatctgaagctaaaattaagaaacgtcaggctcctgatccgaatttggagtggacacagatatctaccagatatcttcgagagcagttggccaagatttctgacttttaccacatggcctccagcacgggcgatggccctgtccctgtgccaccagaggtggagcaagccatgaagcaatgggaatacaacgaaaagctagcatttcacatgttccaggaaggaatgttagaaaaacacgaatatttgacatggatcctggatgttttagaaaagatcagaccaatggatgatgatcttcttaaactcttgctaccactaatgctgcagtattcagatgagtttgttcagtcggcctacctgtctcgtcgtcttgcctacttttgtgcccggcgtctttccttgctgctgagcgatagccccaacctccttgctgcccactcaccccacatgatgataggaccaaacaactcgagtatcggggcccccagccctggcccccccggccctggcatgagccccgtgcagctggccttctcagattttctttcctgtgcacagcatggtcccctggtttatggacttagttgtatgttgcagactgtcactctctgttgcccaagtgccttggtgtggaattattccacaaatgaaaataagagcgcaaacccaggctcacccctggatctgctgcaggtggccccgtccagcctccccatgccgggtgggaacacggctttcaatcagcaggttcgggcaaggatttatgaagtagaacaacagataaaacaaagaggccgtgcagtggaagttcggtggtcatttgacaagtgccaagaatccacagcaggggtgactattagtcgggttttgcacacgttggaagttttggatcgtcactgttttgaccgaactgattccagcaattccatggagacactttatcataagattttctgggcaaaccaaaacaaagataaccaagaggttgcgcccaacgatgaagctgtggtgacgctgttatgtgaatgggccgtgagctgcaaacggtctggcaagcacagggccatggctgtggcaaaactcctggagaagaggcaagcagaaattgaggcagagagatgtggtgaatcagaagtcttagatgagaaggagtctatttcttcatcctctcttgctggatccagtttgcctgttttccagaatgtgctgttaaggtttttagatacacaggccccctctttgtcggacccaaacagtgaatgtgaaaaggtggaatttgtgaacctggtgctgctcttctgcgagttcatccgccatgatgtcttctcccatgacgcatacatgtgtaccctcatatctcgaggagatttgtcagtcactgcctcaactcggccgcggtcaccagtaggggaaaatgcagatgaacactattcaaaggaccatgatgtgaaaatggagattttttctcctatgcctggagaatcctgtgagaatgccaacacttcgttgggcagaagaatgtcagttaattgtgagaagttggtgaagagggaaaagccaagggaattaatttttccatctaattatgacctccttcgccacttacagtatgcaacacattttcctatacctctggatgaatcttcaagtcatgaatgtaaccagcgcacaatccttctctatggagtcggcaaagagcgtgatgaagcaaggcatcagctgaagaagattaccaaagatatcctgaaaattctaaataagaagagcaccacagagacaggggttggggacgaaggacaaaaagccaggaagaacaaacaggagacatttccaacactggagactgtgttcactaaactccagctcctttcatattttgatcaacatcaagtgacatctcagatttctaacaatgtgctagaacaaatcacaagctttgcgtcaggaacatcctatcatctccctttggctcaccacattcagctcatctttgatctcatggagccagcactgaacatcaacggactaattgacttcgcaatacagttactaaatgaactgagtgttgtggaagctgaactgctcctaaaatcctccagcctggcaggaagttatacaacaggactgtgtgtctgcatcgtggctgttctcaggcgctatcacagttgtctaatcttgaatcctgatcagacagcccaggtgtttgaagggttgtgtggtgtggtcaagcatgtcgtaaacccctcagaatgttcttcccctgaaagatgcattttagcctacctctatgatctctatgtgtcatgtagccacctcagaagtaaatttggagacctcttcagtagtgcctgttcaaaagtaaagcaaaccatatataataacgtgatgcctgcaaattcgaacttgcgatgggatccagacttcatgatggattttattgagaatccctcagcccgcagcatcaactactcaatgctgggcaagatcctcagtgacaatgcggccaatcgctacagctttgtctgcaatacactcatgaatgtatgtatgggccatcaggatgctggcaggattaacgacatagccaatttctcctctgagcttacggcttgctgcactgttcttagttcagaatggctgggggttctgaaggctctttgttgttcttcaaatcacgtgtgggggtttaatgatgtactttgcactgtagatgtgagtgacctttcattccatgattcattagctactttcattgctattctgatagcacgacagtgtttttccctggaggacgtcgtgcagcatgtcgcacttccctctcttctagcagcagcttgtggggatgcggacgccgagcctggggcgagaatgacatgccgactcttgcttcatctcttccgagctccccaggcctgcttcttacctcaagcaacgggcaaacctttccctggaataagatcatcttgtgatagacacctcttagccgctgctcacaacagcattgaagtgggagccgtgtttgctgtcttaaaagcaattatgatgcttggagatgccaaaattggcaataacagtgtcagctctttaaagaatgatgacttcaccatgagaggtttgcgatgtgatgggaatgctgatgatatctggactgcctcacaaaatccaaaatcctgtgggaaaagcatttccatagaaactgccaatttaagagaatacgctagatatgtactgaggactatctgtcaacaggaatgggtaggagagcattgcttaaaagaacctgaaagattatgtacagacaaagaacttatattggaccctgtgctttcaaatatgcaagcacagaaattactgcagcttatctgttatcctcatggcattaaagaatgtaccgagggggacaatctgcaaagacagcacattaagcgtattcttcagaatcttgagcagtggacactgaggcaatcctggttagaactccagctaatgatcaaacagtgcttgaaggaccctggctctggttctgtggccgaaatgaacaacttactggacaatattgcaaaggcaacaatagaggtattccagcagtctgcagacctaaataattcttctaattctggcatgagcctcttcaacccaaacagtattggaagtgctgatacaagtagcacgagacagaatggaataaagacattcctaagttcctccgaacgcaggggtgtatggttggtggcccccctcatcgccaggttgccaacttctgtgcaaggaagagtgctgaaagccgctggggaagagctggagaagggacagcacttgggttcttcttccaaaaaggaaagggacagacagaaacagaaaagtatgtctcttttgagtcaacaacccttcctctcactggtacttacctgccttaagggacaagatgaacaaagggaaggcctcctaacatctctccagaatcaagttaaccagattttaagtaactggagagaagaacgataccaagatgacataaaagcgcggcagatgatgcacgaagcattgcaactccgcctaaatttggtaggaggaatgtttgacacggtgcagaggagcacccagtggactacagactgggccctgctactccttcagatcattacttcaggaactgttgacatgcacactaacaatgaattattcacaacagttcttgacatgctgggtgttttaatcaatggaacgttagcctctgacctatcaaatgcatcccctgggggatctgaagagaacaagcgtgcatacatgaatttagtaaagaaactgaaaaaagagctaggagacaagcgatcagaaagtattgacaaagttcgacagttactacctttgccgaaacagacatgtgatgtcatcacttgtgaacctatgggttccttgattgacacaaaaggaaacaaaattgctggatttgactctatagataaaaaacagggtctccaggtctctacgaagcagaaggtgtccccgtgggacttgtttgagggtcagaagaacccagctcctttgtcctgggcctggtttgggacagtccgagtggaccgaagagtgatcaagtacgaggagcagcatcacctcctgctgtatcacacacaccccatgcccaagccccgcagttactacctccagccactgcccctgcctcctgaggaggaagaggaagagcccacatctccagtttctcaggaaccagaaaggaagtccgctgagctgtcagatcagggaaaaaccacaacagatgaagaaaagaaaacaaaaggaaggaagcgcaagacgaaatctagctcaagagttgatgaatatccacagagcaacatataccgagtgcctcctaattactcgcctatctcctcccaaatgatgcaccatccacagtccaccttgtggggttacaacctcgtgggccagccccagcagcccggctttttccttcagaaccaatctcttactccaggtggctccagattggaccctgcaggctcctttgtcccaaccaacaccaaacaagctctgtcaaacatgctacagcggcgctcaggcgccatgatgcagccgccttctcttcatgcaatcacatcgcagcagcagttgatacagatgaagcttctgcagcagcagcagcaacagcgacttctcaggcaagcccagactcggcctttccaacagggccagccgggggaccaggctgctctctttgctgcgcaagcacggccctcccctcagctccctcagtatccagggctgcagcaagcacagaccatgccacagggctatacaatgtatgggacacagatgcctttgcagcagacatcgcagcagcaggctggcagtgtggtcctgtctcccagctataactccagagcctatccggccgcacattccaaccccgtgctaatggaaagactcagacagattcagcagcagccgagtggctatgttcagcagcaggcctcgccgtacctgcagcccctgactggctctcagagactgaaccatcaggctctacagcagagccctctggtgggcgggggaattgatgctgtgctgacttctgcacatccaaaccttccctccgtgcccctgcctcaggatcccatgagacccagacagccgcaagttcgacagcagcagagactcctccagatgcagcagccccagcagccccagccccagcagcctccccagccccagcagtcctcgcagtcccagagtcagacccttggtctccaagcaatgcagccccagcagcccttgtttcccaggcaaggcttgcagcagacccagcagcagcagcagacggccgccttggtgcggcagctccagaagcagctttccagcaaccagccacagcaaggagtgactccgtatgggcatccttcacacttctga

SEQ ID NO: 128 - protein, 2145 aa, Homo sapiens
MAAFGLLSYEQRPLKRPRLGPPDVYPQDPKQKEDELTAVNVKQGFNNQPAFTGDEHGSARNIVINPSKIGAYFSSILAEKLKLNTFQDTGKKKPQVNAKDNYWLVTARSQSAIHSWFSDLAGNKPLSILAKKVPILSKKEDVFAYLAKYSVPMVRATWLIKMTCAYYSAISEAKIKKRQAPDPNLEWTQISTRYLREQLAKISDFYHMASSTGDGPVPVPPEVEQAMKQWEYNEKLAFHMFQEGMLEKHEYLTWILDVLEKIRPMDDDLLKLLLPLMLQYSDEFVQSAYLSRRLAYFCARRLSLLLSDSPNLLAAHSPHMMIGPNNSSIGAPSPGPPGPGMSPVQLAFSDFLSCAQHGPLVYGLSCMLQTVTLCCPSALVWNYSTNENKSANPGSPLDLLQVAPSSLPMPGGNTAFNQQVRARIYEVEQQIKQRGRAVEVRWSFDKCQESTAGVTISRVLHTLEVLDRHCFDRTDSSNSMETLYHKIFWANQNKDNQEVAPNDEAVVTLLCEWAVSCKRSGKHRAMAVAKLLEKRQAEIEAERCGESEVLDEKESISSSSLAGSSLPVFQNVLLRFLDTQAPSLSDPNSECEKVEFVNLVLLFCEFIRHDVFSHDAYMCTLISRGDLSVTASTRPRSPVGENADEHYSKDHDVKMEIFSPMPGESCENANTSLGRRMSVNCEKLVKREKPRELIFPSNYDLLRHLQYATHFPIPLDESSSHECNQRTILLYGVGKERDEARHQLKKITKDILKILNKKSTTETGVGDEGQKARKNKQETFPTLETVFTKLQLLSYFDQHQVTSQISNNVLEQITSFASGTSYHLPLAHHIQLIFDLMEPALNINGLIDFAIQLLNELSVVEAELLLKSSSLAGSYTTGLCVCIVAVLRRYHSCLILNPDQTAQVFEGLCGVVKHVVNPSECSSPERCILAYLYDLYVSCSHLRSKFGDLFSSACSKVKQTIYNNVMPANSNLRWDPDFMMDFIENPSARSINYSMLGKILSDNAANRYSFVCNTLMNVCMGHQDAGRINDIANFSSELTACCTVLSSEWLGVLKALCCSSNHVWGFNDVLCTVDVSDLSFHDSLATFIAILIARQCFSLEDVVQHVALPSLLAAACGDADAEPGARMTCRLLLHLFRAPQACFLPQATGKPFPGIRSSCDRHLLAAAHNSIEVGAVFAVLKAIMMLGDAKIGNNSVSSLKNDDFTMRGLRCDGNADDIWTASQNPKSCGKSISIETANLREYARYVLRTICQQEWVGEHCLKEPERLCTDKELILDPVLSNMQAQKLLQLICYPHGIKECTEGDNLQRQHIKRILQNLEQWTLRQSWLELQLMIKQCLKDPGSGSVAEMNNLLDNIAKATIEVFQQSADLNNSSNSGMSLFNPNSIGSADTSSTRQNGIKTFLSSSERRGVWLVAPLIARLPTSVQGRVLKAAGEELEKGQHLGSSSKKERDRQKQKSMSLLSQQPFLSLVLTCLKGQDEQREGLLTSLQNQVNQILSNWREERYQDDIKARQMMHEALQLRLNLVGGMFDTVQRSTQWTTDWALLLLQIITSGTVDMHTNNELFTTVLDMLGVLINGTLASDLSNASPGGSEENKRAYMNLVKKLKKELGDKRSESIDKVRQLLPLPKQTCDVITCEPMGSLIDTKGNKIAGFDSIDKKQGLQVSTKQKVSPWDLFEGQKNPAPLSWAWFGTVRVDRRVIKYEEQHHLLLYHTHPMPKPRSYYLQPLPLPPEEEEEEPTSPVSQEPERKSAELSDQGKTTTDEEKKTKGRKRKTKSSSRVDEYPQSNIYRVPPNYSPISSQMMHHPQSTLWGYNLVGQPQQPGFFLQNQSLTPGGSRLDPAGSFVPTNTKQALSNMLQRRSGAMMQPPSLHAITSQQQLIQMKLLQQQQQQRLLRQAQTRPFQQGQPGDQAALFAAQARPSPQLPQYPGLQQAQTMPQGYTMYGTQMPLQQTSQQQAGSVVLSPSYNSRAYPAAHSNPVLMERLRQIQQQPSGYVQQQASPYLQPLTGSQRLNHQALQQSPLVGGGIDAVLTSAHPNLPSVPLPQDPMRPRQPQVRQQQRLLQMQQPQQPQPQQPPQPQQSSQSQSQTLGLQAMQPQQPLFPRQGLQQTQQQQQTAALVRQLQKQLSSNQPQQGVTPYGHPSHF

SEQ ID NO: 129 - DNA, 3603 bp, Homo sapiens
cccgaggagccaccgcccagccgctcgcaggcgccgcacggagttgcgtcccggggacttggggccgcagggagctgtgagtacccaggaagctgcaccgtgtggcctggagctgtctatctgtccttccagccacctgtctgtccagccacccttccacagactgaggcttgacaccggagcatctgtacagagcaaggagaagacaagaacatgctctaaagcccttcacagcaagacccaggaagccgcgggcaaactcagactcgaagccctcccgcctcctgcccacaatggcctctgctgacaagaatggcgggagcgtgtcctctgtgtccagcagccgcctgcagagccggaagccacccaacctctccatcaccatcccgccacccgagaaagagacccaggcccctggcgagcaggacagcatgctgcctgagggttttcagaataggaggctaaagaaaagccagcccaggacctgggctgcacacaccaccgcctgccctccctccttcctccccaagaggaagaacccagcctacttgaagagcgtcagcctccaggagccacgcagccgatggcaggagagttcagagaagcgccctggcttccgccgccaggcctcactgtcccagagcatccgcaagggcgcagcccagtggtttggagtcagcggcgactgggaggggcagcggcagcagtggcagcgccgcagcctgcaccactgcagcatgcgctacggccgcctgaaggcctcgtgccagcgtgacctggagctccccagccaggaggcaccgtccttccagggcactgagtccccaaagccctgcaagatgcccaagattgtggatccgctggcccggggccgggccttccgccacccggaggagatggacaggccccacgccccgcacccaccgctgacccccggagtcctgtccctcacctccttcaccagtgtccgttctggctactcccacctgccacgccgcaagagaatgtctgtggcccacatgagcttgcaagctgccgctgccctcctcaaggggcgctcggtgctggatgccaccggacagcggtgccgggtggtcaagcgcagctttgccttcccgagcttcctggaggaggatgtggtcgatggggcagacacgtttgactcctccttttttagtaaggaagaaatgagctccatgcctgatgatgtctttgagtcccccccactctctgccagctacttccgagggatcccacactcagcctcccctgtctcccccgatggggtgcaaatccctctgaaggagtatggccgagccccagtccccgggccccggcgcggcaagcgcatcgcctccaaggtgaagcactttgcctttgatcggaagaagcggcactacggcctcggcgtggtgggcaactggctgaaccgcagctaccgccgcagcatcagcagcactgtgcagcggcagctggagagcttcgacagccaccggccctacttcacctactggctgaccttcgtccatgtcatcatcacgctgctggtgatttgcacgtatggcatcgcacccgtgggctttgcccagcacgtcaccacccagctggtgctgcggaacaaaggtgtgtacgagagcgtgaagtacatccagcaggagaacttctgggttggccccagctcgattgacctgatccacctgggggccaagttctcaccctgcatccggaaggacgggcagatcgagcagctggtgctgcgcgagcgagacctggagcgggactcaggctgctgtgtccagaatgaccactccggatgcatccagacccagcggaaggactgctcggagactttggccacttttgtcaagtggcaggatgacactgggccccccatggacaagtctgatctgggccagaagcggacttcgggggctgtctgccaccaggaccccaggacctgcgaggagccagcctccagcggtgcccacatctggcccgatgacatcactaagtggccgatctgcacagagcaggccaggagcaaccacacaggcttcctgcacatggactgcgagatcaagggccgcccctgctgcatcggcaccaagggcagctgtgagatcaccacccgggaatactgtgagttcatgcacggctatttccatgaggaagcaacactctgctcccaggtgcactgcttggacaaggtgtgtgggctgctgcccttcctcaaccctgaggtcccagatcagttctacaggctctggctgtctctcttcctacatgctggcgtggtgcactgcctcgtgtctgtggtctttcaaatgaccatcctgagggacctggagaagctggccggctggcaccgtatcgccatcatcttcatcctcagtggcatcacaggcaacctcgccagtgccatctttctcccataccgggcagaggtgggcccggccggctcacagttcggcctcctcgcctgcctcttcgtggagctcttccagagctggccgctgctggagaggccctggaaggccttcctcaacctctcggccatcgtgctcttcctgttcatctgtggcctcctgccctggatcgacaacatcgcccacatcttcggcttcctcagtggcctgctgctggccttcgccttcctgccctacatcaccttcggcaccagcgacaagtaccgcaagcgggcactcatcctggtgtcactgctggcctttgccggcctcttcgccgccctcgtgctgtggctgtacatctaccccattaactggccctggatcgagcacctcacctgcttccccttcaccagccgcttctgcgagaagtatgagctggaccaggtgctgcactgaccgctgggccacacggctgcccctcagccctgctggaacagggtctgcctgcgagggctgccctctgcagagcgctctctgtgtgccagagagccagagacccaagacagggcccgggctctggacctgggtgcccccctgccaggcgaggctgactccgcgtgagatggttggttaaggcggggtttttctggggcgtgaggcctgtgagatcctgacccaagctcaggcacacccaaggcacctgcctctctgagtcttgggtctcagttcctaatatcccgctccttgctgagaccatctcctggggcagggtccttttcttcccaggtcctcagcgctgcctctgctggtgccttctcccccactactactggagcgtgcccttgctggggacgtggctgtgccctcagttgcccccagggctgggtgcccaccatgccccttcctctttctcctcctacctctgccctgtgagcccatccataaggctctcagatgggacattgtgggaaaggctttggccatggtctgggggcagagaacaaggggggagacacaagtagacctcaggtagaacgacactgggcggagccaccccagggcctgctcccagggagtgctcgaggcgcatcaggcccgttttttaccagtttatatcacggtcttcatttttaaaagtaacgctaactttgtacggacgatgtctcatggattaaataatattctttatggcagt

SEQ ID NO: 130 - protein, 856 aa, Homo sapiens
MASADKNGGSVSSVSSSRLQSRKPPNLSITIPPPEKETQAPGEQDSMLPEGFQNRRLKKSQPRTWAAHTTACPPSFLPKRKNPAYLKSVSLQEPRSRWQESSEKRPGFRRQASLSQSIRKGAAQWFGVSGDWEGQRQQWQRRSLHHCSMRYGRLKASCQRDLELPSQEAPSFQGTESPKPCKMPKIVDPLARGRAFRHPEEMDRPHAPHPPLTPGVLSLTSFTSVRSGYSHLPRRKRMSVAHMSLQAAAALLKGRSVLDATGQRCRVVKRSFAFPSFLEEDVVDGADTFDSSFFSKEEMSSMPDDVFESPPLSASYFRGIPHSASPVSPDGVQIPLKEYGRAPVPGPRRGKRIASKVKHFAFDRKKRHYGLGVVGNWLNRSYRRSISSTVQRQLESFDSHRPYFTYWLTFVHVIITLLVICTYGIAPVGFAQHVTTQLVLRNKGVYESVKYIQQENFWVGPSSIDLIHLGAKFSPCIRKDGQIEQLVLRERDLERDSGCCVQNDHSGCIQTQRKDCSETLATFVKWQDDTGPPMDKSDLGQKRTSGAVCHQDPRTCEEPASSGAHIWPDDITKWPICTEQARSNHTGFLHMDCEIKGRPCCIGTKGSCEITTREYCEFMHGYFHEEATLCSQVHCLDKVCGLLPFLNPEVPDQFYRLWLSLFLHAGVVHCLVSVVFQMTILRDLEKLAGWHRIAIIFILSGITGNLASAIFLPYRAEVGPAGSQFGLLACLFVELFQSWPLLERPWKAFLNLSAIVLFLFICGLLPWIDNIAHIFGFLSGLLLAFAFLPYITFGTSDKYRKRALILVSLLAFAGLFAALVLWLYIYPINWPWIEHLTCFPFTSRFCEKYELDQVLH

SEQ ID NO: 131 - DNA, 3516 bp, Homo sapiens
cccgaggagccaccgcccagccgctcgcaggcgccgcacggagttgcgtcccggggacttggggccgcagggagctgtgagtacccaggaagctgcaccgtgtggcctggagctgtctatctgtccttccagccacctgtctgtccagccacccttccacagactgaggcttgacaccggagcatctgtacagagcaaggagaagacaagaacatgctctaaagcccttcacagcaagacccaggaagccgcgggcaaactcagactcgaagccctcccgcctcctgcccacaatggcctctgctgacaagaatggcgggagcgtgtcctctgtgtccagcagccgcctgcagagccggaagccacccaacctctccatcaccatcccgccacccgagaaagagacccaggcccctggcgagcaggacagcatgctgcctgagaggaagaacccagcctacttgaagagcgtcagcctccaggagccacgcagccgatggcaggagagttcagagaagcgccctggcttccgccgccaggcctcactgtcccagagcatccgcaagggcgcagcccagtggtttggagtcagcggcgactgggaggggcagcggcagcagtggcagcgccgcagcctgcaccactgcagcatgcgctacggccgcctgaaggcctcgtgccagcgtgacctggagctccccagccaggaggcaccgtccttccagggcactgagtccccaaagccctgcaagatgcccaagattgtggatccgctggcccggggccgggccttccgccacccggaggagatggacaggccccacgccccgcacccaccgctgacccccggagtcctgtccctcacctccttcaccagtgtccgttctggctactcccacctgccacgccgcaagagaatgtctgtggcccacatgagcttgcaagctgccgctgccctcctcaaggggcgctcggtgctggatgccaccggacagcggtgccgggtggtcaagcgcagctttgccttcccgagcttcctggaggaggatgtggtcgatggggcagacacgtttgactcctccttttttagtaaggaagaaatgagctccatgcctgatgatgtctttgagtcccccccactctctgccagctacttccgagggatcccacactcagcctcccctgtctcccccgatggggtgcaaatccctctgaaggagtatggccgagccccagtccccgggccccggcgcggcaagcgcatcgcctccaaggtgaagcactttgcctttgatcggaagaagcggcactacggcctcggcgtggtgggcaactggctgaaccgcagctaccgccgcagcatcagcagcactgtgcagcggcagctggagagcttcgacagccaccggccctacttcacctactggctgaccttcgtccatgtcatcatcacgctgctggtgatttgcacgtatggcatcgcacccgtgggctttgcccagcacgtcaccacccagctggtgctgcggaacaaaggtgtgtacgagagcgtgaagtacatccagcaggagaacttctgggttggccccagctcgattgacctgatccacctgggggccaagttctcaccctgcatccggaaggacgggcagatcgagcagctggtgctgcgcgagcgagacctggagcgggactcaggctgctgtgtccagaatgaccactccggatgcatccagacccagcggaaggactgctcggagactttggccacttttgtcaagtggcaggatgacactgggccccccatggacaagtctgatctgggccagaagcggacttcgggggctgtctgccaccaggaccccaggacctgcgaggagccagcctccagcggtgcccacatctggcccgatgacatcactaagtggccgatctgcacagagcaggccaggagcaaccacacaggcttcctgcacatggactgcgagatcaagggccgcccctgctgcatcggcaccaagggcagctgtgagatcaccacccgggaatactgtgagttcatgcacggctatttccatgaggaagcaacactctgctcccaggtgcactgcttggacaaggtgtgtgggctgctgcccttcctcaaccctgaggtcccagatcagttctacaggctctggctgtctctcttcctacatgctggcgtggtgcactgcctcgtgtctgtggtctttcaaatgaccatcctgagggacctggagaagctggccggctggcaccgtatcgccatcatcttcatcctcagtggcatcacaggcaacctcgccagtgccatctttctcccataccgggcagaggtgggcccggccggctcacagttcggcctcctcgcctgcctcttcgtggagctcttccagagctggccgctgctggagaggccctggaaggccttcctcaacctctcggccatcgtgctcttcctgttcatctgtggcctcctgccctggatcgacaacatcgcccacatcttcggcttcctcagtggcctgctgctggccttcgccttcctgccctacatcaccttcggcaccagcgacaagtaccgcaagcgggcactcatcctggtgtcactgctggcctttgccggcctcttcgccgccctcgtgctgtggctgtacatctaccccattaactggccctggatcgagcacctcacctgcttccccttcaccagccgcttctgcgagaagtatgagctggaccaggtgctgcactgaccgctgggccacacggctgcccctcagccctgctggaacagggtctgcctgcgagggctgccctctgcagagcgctctctgtgtgccagagagccagagacccaagacagggcccgggctctggacctgggtgcccccctgccaggcgaggctgactccgcgtgagatggttggttaaggcggggtttttctggggcgtgaggcctgtgagatcctgacccaagctcaggcacacccaaggcacctgcctctctgagtcttgggtctcagttcctaatatcccgctccttgctgagaccatctcctggggcagggtccttttcttcccaggtcctcagcgctgcctctgctggtgccttctcccccactactactggagcgtgcccttgctggggacgtggctgtgccctcagttgcccccagggctgggtgcccaccatgccccttcctctttctcctcctacctctgccctgtgagcccatccataaggctctcagatgggacattgtgggaaaggctttggccatggtctgggggcagagaacaaggggggagacacaagtagacctcaggtagaacgacactgggcggagccaccccagggcctgctcccagggagtgctcgaggcgcatcaggcccgttttttaccagtttatatcacggtcttcatttttaaaagtaacgctaactttgtacggacgatgtctcatggattaaataatattctttatggcagt

SEQ ID NO: 132 - protein, 827 aa, Homo sapiens
MASADKNGGSVSSVSSSRLQSRKPPNLSITIPPPEKETQAPGEQDSMLPERKNPAYLKSVSLQEPRSRWQESSEKRPGFRRQASLSQSIRKGAAQWFGVSGDWEGQRQQWQRRSLHHCSMRYGRLKASCQRDLELPSQEAPSFQGTESPKPCKMPKIVDPLARGRAFRHPEEMDRPHAPHPPLTPGVLSLTSFTSVRSGYSHLPRRKRMSVAHMSLQAAAALLKGRSVLDATGQRCRVVKRSFAFPSFLEEDVVDGADTFDSSFFSKEEMSSMPDDVFESPPLSASYFRGIPHSASPVSPDGVQIPLKEYGRAPVPGPRRGKRIASKVKHFAFDRKKRHYGLGVVGNWLNRSYRRSISSTVQRQLESFDSHRPYFTYWLTFVHVIITLLVICTYGIAPVGFAQHVTTQLVLRNKGVYESVKYIQQENFWVGPSSIDLIHLGAKFSPCIRKDGQIEQLVLRERDLERDSGCCVQNDHSGCIQTQRKDCSETLATFVKWQDDTGPPMDKSDLGQKRTSGAVCHQDPRTCEEPASSGAHIWPDDITKWPICTEQARSNHTGFLHMDCEIKGRPCCIGTKGSCEITTREYCEFMHGYFHEEATLCSQVHCLDKVCGLLPFLNPEVPDQFYRLWLSLFLHAGVVHCLVSVVFQMTILRDLEKLAGWHRIAIIFILSGITGNLASAIFLPYRAEVGPAGSQFGLLACLFVELFQSWPLLERPWKAFLNLSAIVLFLFICGLLPWIDNIAHIFGFLSGLLLAFAFLPYITFGTSDKYRKRALILVSLLAFAGLFAALVLWLYIYPINWPWIEHLTCFPFTSRFCEKYELDQVLH

SEQ ID NO: 133 - DNA, 4539 bp, Homo sapiens
gaaatctttgcattcatcaaaaaagacaagaggcctagggccgggtgtgctgggattacaggcgtgagccaccgcgcccagccgcccagagatgtttgaaccaactttaggcaagttggttcttggtctgggctgcgtgccctggcgtcagggtcctgacactgcgccaccccgcaccgcccaccgctgctctcccggtctccattccagccctcccgcctcctgcccacaatggcctctgctgacaagaatggcgggagcgtgtcctctgtgtccagcagccgcctgcagagccggaagccacccaacctctccatcaccatcccgccacccgagaaagagacccaggcccctggcgagcaggacagcatgctgcctgagaggaagaacccagcctacttgaagagcgtcagcctccaggagccacgcagccgatggcaggagagttcagagaagcgccctggcttccgccgccaggcctcactgtcccagagcatccgcaagtgagcccccctacacccaagcccagcaccccccacccagcaacctgtggattctcggggcctggacatgattgggcctggtccctgcgtcccctctctggaaggaggaggccggcattaatgagcaatgtctccctgtggcctattatcatggtatagatggggaaatgggtatgtgctttgcggaatatcacggtgtggaggctggggggcttcgaggagctgggtggatcagtgtgggggtgcctggggccctagcctggctcctcacgctcccgtcatcccctgcttctgctcatctggtcactgggctccagccaggggcctcacaggcagatccgccccccacctccctgtaggcacgcgggcacacacgtgccatcaccccttccacacactcaggtgcacaggcgtagacaagcgtatgcccacctgtcccttgtctgcttccgcaggggcgcagcccagtggtttggagtcagcggcgactgggaggggcagcggcagcagtggcagcgccgcagcctgcaccactgcagcatgcgctacggccgcctgaaggcctcgtgccagcgtgacctggagctccccagccaggaggcaccgtccttccagggcactgagtccccaaagccctgcaagatgcccaagattgtggatccgctggcccggggccgggccttccgccacccggaggagatggacaggccccacgccccgcacccaccgctgacccccggagtcctgtccctcacctccttcaccagtgtccgttctggctactcccacctgccacgccgcaagagaatgtctgtggcccacatgagcttgcaagctgccgctgccctcctcaaggggcgctcggtgctggatgccaccggacagcggtgccgggtggtcaagcgcagctttgccttcccgagcttcctggaggaggatgtggtcgatggggcagacacgtttgactcctccttttttagtaaggaagaaatgagctccatgcctgatgatgtctttgagtcccccccactctctgccagctacttccgagggatcccacactcagcctcccctgtctcccccgatggggtgcaaatccctctgaaggagtatggccgagccccagtccccgggccccggcgcggcaagcgcatcgcctccaaggtgaagcactttgcctttgatcggaagaagcggcactacggcctcggcgtggtgggcaactggctgaaccgcagctaccgccgcagcatcagcagcactgtgcagcggcagctggagagcttcgacagccaccggccctacttcacctactggctgaccttcgtccatgtcatcatcacgctgctggtgatttgcacgtatggcatcgcacccgtgggctttgcccagcacgtcaccacccagctggtgctgcggaacaaaggtgtgtacgagagcgtgaagtacatccagcaggagaacttctgggttggccccagctcgattgacctgatccacctgggggccaagttctcaccctgcatccggaaggacgggcagatcgagcagctggtgctgcgcgagcgagacctggagcgggactcaggctgctgtgtccagaatgaccactccggatgcatccagacccagcggaaggactgctcggagactttggccacttttgtcaagtggcaggatgacactgggccccccatggacaagtctgatctgggccagaagcggacttcgggggctgtctgccaccaggaccccaggacctgcgaggagccagcctccagcggtgcccacatctggcccgatgacatcactaagtggccgatctgcacagagcaggccaggagcaaccacacaggcttcctgcacatggactgcgagatcaagggccgcccctgctgcatcggcaccaagggcagctgtgagatcaccacccgggaatactgtgagttcatgcacggctatttccatgaggaagcaacactctgctcccaggtgcactgcttggacaaggtgtgtgggctgctgcccttcctcaaccctgaggtcccagatcagttctacaggctctggctgtctctcttcctacatgctggcgtggtgcactgcctcgtgtctgtggtctttcaaatgaccatcctgagggacctggagaagctggccggctggcaccgtatcgccatcatcttcatcctcagtggcatcacaggcaacctcgccagtgccatctttctcccataccgggcagaggtaaggatgtggaggatgggaccccttccgcacatagggggccagccctgctgctcctattccacccacctgggatctgccagagggacacggtgcccctcctgtactgggctccacagcggagggacagctaatctgggggcttactggctggtctcttaatcccagtgagagggaacagtgatgctcttgagtcaccctgtccctccaccgcctcatttatcttcctaaccgtgcccactgcctgacagtatgctaggtatctgcaggtcgagcggtaggaaatggcctccgtgcgccgtcggcagtctgatcagttccacctgactgatctagtttgttcagtgtccgtcctctccccaccgtgtgcggcctggaacaggcttgtctgtcttgcttattgctacggacccacaccaggcacgtacacagtaggcgctcagtgtttgctgaaagaatgggcggagcaggcccagctttggtccagcagctccagccgaccccctgcccctcagcctcaggggtccccatgcctgccagggaggagctgatcgatgggatgacccagggtgcaggcccggcccaggccacccacctgatgcctgaagccacgtctcccctgccccgccccaggtgggcccggccggctcacagttcggcctcctcgcctgcctcttcgtggagctcttccagagctggccgctgctggagaggccctggaaggccttcctcaacctctcggccatcgtgctcttcctgttcatctgtggcctcctgccctggatcgacaacatcgcccacatcttcggcttcctcagtggcctgctgctggccttcgccttcctgccctacatcaccttcggcaccagcgacaagtaccgcaagcgggcactcatcctggtgtcactgctggcctttgccggcctcttcgccgccctcgtgctgtggctgtacatctaccccattaactggccctggatcgagcacctcacctgcttccccttcaccagccgcttctgcgagaagtatgagctggaccaggtgctgcactgaccgctgggccacacggctgcccctcagccctgctggaacagggtctgcctgcgagggctgccctctgcagagcgctctctgtgtgccagagagccagagacccaagacagggcccgggctctggacctgggtgcccccctgccaggcgaggctgactccgcgtgagatggttggttaaggcggggtttttctggggcgtgaggcctgtgagatcctgacccaagctcaggcacacccaaggcacctgcctctctgagtcttgggtctcagttcctaatatcccgctccttgctgagaccatctcctggggcagggtccttttcttcccaggtcctcagcgctgcctctgctggtgccttctcccccactactactggagcgtgcccttgctggggacgtggctgtgccctcagttgcccccagggctgggtgcccaccatgccccttcctctttctcctcctacctctgccctgtgagcccatccataaggctctcagatgggacattgtgggaaaggctttggccatggtctgggggcagagaacaaggggggagacacaagtagacctcaggtagaacgacactgggcggagccaccccagggcctgctcccagggagtgctcgaggcgcatcaggcccgttttttaccagtttatatcacggtcttcatttttaaaagtaacgctaactttgtacggacgatgtctcatggattaaataatattctttatggc

SEQ ID NO: 134 - protein, 716 aa, Homo sapiens
PGSSRSRHPLLLLIWSLGSSQGPHRQIRPPPPCRHAGTHVPSPLPHTQVHRRRQAYAHLSLVCFRRGAAQWFGVSGDWEGQRQQWQRRSLHHCSMRYGRLKASCQRDLELPSQEAPSFQGTESPKPCKMPKIVDPLARGRAFRHPEEMDRPHAPHPPLTPGVLSLTSFTSVRSGYSHLPRRKRMSVAHMSLQAAAALLKGRSVLDATGQRCRVVKRSFAFPSFLEEDVVDGADTFDSSFFSKEEMSSMPDDVFESPPLSASYFRGIPHSASPVSPDGVQIPLKEYGRAPVPGPRRGKRIASKVKHFAFDRKKRHYGLGVVGNWLNRSYRRSISSTVQRQLESFDSHRPYFTYWLTFVHVIITLLVICTYGIAPVGFAQHVTTQLVLRNKGVYESVKYIQQENFWVGPSSIDLIHLGAKFSPCIRKDGQIEQLVLRERDLERDSGCCVQNDHSGCIQTQRKDCSETLATFVKWQDDTGPPMDKSDLGQKRTSGAVCHQDPRTCEEPASSGAHIWPDDITKWPICTEQARSNHTGFLHMDCEIKGRPCCIGTKGSCEITTREYCEFMHGYFHEEATLCSQVHCLDKVCGLLPFLNPEVPDQFYRLWLSLFLHAGVVHCLVSVVFQMTILRDLEKLAGWHRIAIIFILSGITGNLASAIFLPYRAEVRMWRMGPLPHIGGQPCCSYSTHLGSARGTRCPSCTGLHSGGTANLGAYWLVS

SEQ ID NO: 135 - DNA, 1866 bp, Homo sapiens
atgttgatggcaggacaaaggggcgcctggaccatgggtgatgtggtcgagaagagtttggaagggcccctggcaccttctacagatgagccctcccagaaaacaggagacttggtcgagatcttaaatggggaaaaggtcaaatttgacgacgcgggactctccttaattcttcagaatggcctggaaaccctgcgaatggaaaacgctctgacagatgtcatcttgtgtgtggacattcaggaattctcctgccaccgcgtggtgcttgccgcagccagcaactatttcagggccatgttctgcaacgatttaaaggaaaagtatgagaaaaggatcattattaaaggggttgatgctgagaccatgcacactctgttggactacacgtacaccagcaaggcgctgatcaccaagcagaatgtccagcgggtcctggaggctgctaacctcttccagttcctgcggatggtggatgcctgtgccagcttcctcactgaagccttgaacccagaaaactgcgttggaatactgaggctggctgacacacactcgctggacagtctaaagaagcaggttcagagttacatcattcaaaactttgtgcagattctgaactctgaggagtttcttgacctgcccgtggacactctgcaccacatcttgaagagtgatgacctttacgtgaccgaggaggctcaggtgtttgagaccgtgatgagctgggtccggcacaagccatcagaacgactctgcttactcccctatgtcctcgagaacgtgcgcttaccgcttctggacccgtggtactttgtggagacggtggaagcagatcctctcatcaggcagtgcccagaggtcttcccgctgctccaggaagccaggatgtaccacctttctggcaatgagatcatttcggaacgcaccaagcccaggatgcatgagttccagtctgaggtgttcatgatcattggcggctgcacgaaggatgaacggtttgtggcagaggtgacctgcctggaccccctgaggcgcagccgcctggaggtggccaagctcccgctaacagagcatgagctggagagtgagaataagaagtgggtggagtttgcatgcgtgacattgaaaaatgaggtctacatctcaggtggcaaagaaacacagcatgatgtttggaaatataattcttcgatcaacaagtggattcagattgagtatttaaacataggccgctggaggcataagatggtggtgttgggtggcaaggtctatgtgatcggaggctttgacggcttacagagaatcaacaatgtggagacctacgacccctttcacaactgctggtcagaggccgcacccctccttgtccatgtcagttcctttgcagccaccagccataagaagaagctgtatgtgatcgggggagggcccaatgggaaactggccacagacaagactcagtgttatgacccttccaccaacaagtggagtttgaaggcggccatgcccgtggaggctaaatgcatcaatgcagtgagtttccgggaccgcatctatgtcgttggtggggccatgagagcgctgtacgcctacagcccgctggaagacagctggtgcctggtgacccagctcagccacgagcgggccagctgcggtatcgcgccctgcaacaaccggctctacatcaccggcgggcgggacgagaagaacgaggttatcgccacggtgctgtgctgggaccccgaggcccagaaactgacagaggagtgcgtcctgccccggggcgtgtcgcaccacggcagcgtcaccatcaggaagtcgtacacccacatccgcaggatcgtgcccggagcagtgtctgtctga

SEQ ID NO: 136 - protein, 621 aa, Homo sapiens
MLMAGQRGAWTMGDVVEKSLEGPLAPSTDEPSQKTGDLVEILNGEKVKFDDAGLSLILQNGLETLRMENALTDVILCVDIQEFSCHRVVLAAASNYFRAMFCNDLKEKYEKRIIIKGVDAETMHTLLDYTYTSKALITKQNVQRVLEAANLFQFLRMVDACASFLTEALNPENCVGILRLADTHSLDSLKKQVQSYIIQNFVQILNSEEFLDLPVDTLHHILKSDDLYVTEEAQVFETVMSWVRHKPSERLCLLPYVLENVRLPLLDPWYFVETVEADPLIRQCPEVFPLLQEARMYHLSGNEIISERTKPRMHEFQSEVFMIIGGCTKDERFVAEVTCLDPLRRSRLEVAKLPLTEHELESENKKWVEFACVTLKNEVYISGGKETQHDVWKYNSSINKWIQIEYLNIGRWRHKMVVLGGKVYVIGGFDGLQRINNVETYDPFHNCWSEAAPLLVHVSSFAATSHKKKLYVIGGGPNGKLATDKTQCYDPSTNKWSLKAAMPVEAKCINAVSFRDRIYVVGGAMRALYAYSPLEDSWCLVTQLSHERASCGIAPCNNRLYITGGRDEKNEVIATVLCWDPEAQKLTEECVLPRGVSHHGSVTIRKSYTHIRRIVPGAVSV

SEQ ID NO: 137 - DNA, 7884 bp, Homo sapiens
atggaaaaactccatgggcatgtgtctgcccatccagacatcctctccttggagaaccggtgcctggctatgctccctgacttacagcccttggagaaactacatcagcatgtatctacccactcagatatcctctccttgaagaaccagtgcctagccacgcttcctgacctgaagaccatggaaaaaccacatggatatgtgtctgcccacccagacatcctctccttggagaaccagtgcctggccacactttctgacctgaagaccatggagaaaccacatggacatgtttctgcccacccagacatcctctccttggagaaccggtgcctggccaccctctctagtctaaagagcactgtgtctgccagccccttgttccagagtctacagatatctcacatgacgcaagctgatttgtaccgtgtgaacaacagcaattgcctgctctctgagcctccaagttggagggctcagcatttctctaagggactagacctttcaacctgccctatagccctgaaatccatctctgccacagagacagctcaggaagcaactttgggtcgttggtttgattcagaagagaagaaaggggcagagacccaaatgccttcttatagtctgagcttgggagaggaggaggaggtggaggatctggccgtgaagctcacctctggagactctgaatctcatccagagcctactgaccatgtccttcaggaaaagaagatggctctactgagcttgctgtgctctactctggtctcagaagtaaacatgaacaatacatctgaccccaccctggctgccatttttgaaatctgtcgtgaacttgccctcctggagcctgagtttatcctcaaggcatctttgtatgccaggcagcagctgaacgtccggaatgtggccaataacatcttggccattgctgctttcttgccggcgtgtcgcccccacctgcgacgatatttctgtgccattgtccagctgccttctgactggatccaggtggctgagctttaccagagcctggctgagggagataagaataagctggtgcccctgcccgcctgtctccgtactgccatgacggacaaatttgcccagtttgacgagtaccagctggctaagtacaaccctcggaagcaccgggccaagagacacccccgccggccaccccgctctccagggatggagcctccattttctcacagatgttttccaaggtacatagggtttctcagagaagagcagagaaagtttgagaaggccggtgatacagtgtcagagaaaaagaatcctccaaggttcaccctgaagaagctggttcagcgactgcacatccacaagcctgcccagcacgttcaagccctgctgggttacagatacccctccaacctacagctcttttctcgaagtcgccttcctgggccttgggattctagcagagctgggaagaggatgaagctgtctaggccagagacctgggagcgggagctgagcctacgggggaacaaagcgtcggtctgggaggaactcattgaaaatgggaagcttcccttcatggccatgcttcggaacctgtgcaacctgctgcgggttggaatcagttcccgccaccatgagctcattctccagagactccagcatgcgaagtcggtgatccacagtcggcagtttccattcagatttcttaacgcccatgatgccattgatgccctcgaggctcaactcagaaatcaagcattgccctttccttcgaatataacactgatgaggcggatactaactagaaatgaaaagaaccgtcccaggcggaggtttctttgccacctaagccgtcagcagcttcggatggcaatgaggatacctgtgttgtatgagcagctcaagagggagaagctgagagtacacaaggccagacagtggaaatatgatggtgagatgctgaacaggtaccgacaggccctagagacagctgtgaacctctctgtgaagcacagcctgcccctgctgccaggccgcactgtcttggtctatctgacagatgctaatgcagacaggctctgtccaaagagcaacccacaagggcccccgctgaactatgcactgctgttgattgggatgatgatcacgagggcggagcaggtggacgtcgtgctgtgtggaggtgacactctgaagactgcagtgcttaaggcagaagaaggcatcctgaagactgccatcaagctccaggctcaagtccaggagtttgatgaaaatgatggatggtccctgaatacttttgggaaatacctgctgtctctggctggccaaagggttcctgtggacagggtcatcctccttggccaaagcatggatgatggaatgataaatgtggccaaacagctttactggcagcgtgtgaattccaagtgcctctttgttggtatcctcctaagaagggtacaatacctgtcaacagatttgaatcccaatgatgtgacactctcaggctgtactgatgcgatactgaagttcattgcagagcatggggcctcccatcttctggaacatgtgggccaaatggacaaaatattcaagattccaccacccccaggaaagacaggggtccagtctctccggccactggaagaggacactccaagccccttggctcctgtttcccagcaaggatggcgcagcatccggcttttcatttcatccactttccgagacatgcatggggagcgggacctgctgctgaggtctgtgctgccagcactgcaggcccgagcggcccctcaccgtatcagccttcacggaatcgacctccgctggggcgtcactgaggaggagacccgtaggaacagacaactggaagtgtgccttggggaggtggagaacgcacagctgtttgtggggattctgggctcccgttatggatacattccccccagctacaaccttcctgaccatccacacttccactgggcccagcagtacccttcagggcgctctgtgacagagatggaggtgatgcagttcctgaaccggaaccaacgtctgcagccctctgcccaagctctcatctacttccgggattccagcttcctcagctctgtgccagatgcctggaaatctgactttgtttctgagtctgaagaggccgcacgtcggatctcagaactgaagagctacctaagcagacagaaagggatcacctgccgcagatacccctgtgagtgggggggtgtggcagctggccggccctatgttggcgggctggaggagtttgggcagttggttctgcaggatgtatggaatatgatccagaagctctacctgcagcctggggccctgctggagcagccagtgtccatcccagacgatgacttggtccaggccaccttccagcagctgcagaagccaccgagtcctgcccggccacgccttcttcaggacacagtgcaacggctgatgctgccccacggaaggctgagcctggtgacggggcagtcaggacagggcaagacagccttcctggcatctcttgtgtcagccctgcaggctcctgatggggccaaggtggcatcattagtcttcttccacttttctggggctcgtcctgaccagggtcttgccctcactctgctcagacgcctctgtacctatctgcgtggccaactaaaagagccaggtgccctccccagcacctaccgaagcctggtgtgggagctgcagcagaggctgctgcccaagtctgctgagtccctgcatcctggccagacccaggtcctgatcatcgatggggctgataggttagtggaccagaatgggcagctgatttcagactggatcccaaagaagcttccccggtgtgtacacctggtgctgagtgtgtctagtgatgcaggcctaggggagacccttgagcagagccagggtgcccacgtgctggccttggggcctctggaggcctctgctcgggcccggctggtgagagaggagctggccctgtacgggaagcggctggaggagtcaccatttaacaaccagatgcgactgctgctggtgaagcgggaatcaggccggccgctctacctgcgcttggtcaccgatcacctgaggctcttcacgctgtatgagcaggtgtctgagagactccggaccctgcctgccactgtccccctgctgctgcagcacatcctgagcacactggagaaggagcacgggcctgatgtccttccccaggccttgactgccctagaagtcacacggagtggtttgactgtggaccagctgcacggagtgctgagtgtgtggcggacactaccgaaggggactaagagctgggaagaagcagtggctgctggtaacagtggagacccctaccccatgggcccgtttgcctgcctcgtccagagtctgcgcagtttgctaggggagggccctctggagcgccctggtgcccggctgtgcctccctgatgggcccctgagaacagcagctaaacgttgctatgggaagaggccagggctagaggacacggcacacatcctcattgcagctcagctctggaagacatgtgacgctgatgcctcaggcaccttccgaagttgccctcctgaggctctgggagacctgccttaccacctgctccagagcgggaaccgtggacttctttcgaagttccttaccaacctccatgtggtggctgcacacttggaattgggtctggtctctcggctcttggaggcccatgccctctatgcttcttcagtccccaaagaggaacaaaagctccccgaggctgacgttgcagtgtttcgcaccttcctgaggcagcaggcttcaatcctcagccagtacccccggctcctgccccagcaggcagccaaccagcccctggactcacctctttgccaccaagcctcgctgctctcccggagatggcacctccaacacacactacgatggcttaataaaccccggaccatgaaaaatcagcaaagctccagcctgtctctggcagtttcctcatcccctactgctgtggccttctccaccaatgggcaaagagcagctgtgggcactgccaatgggacagtttacctgttggacctgagaacttggcaggaggagaagtctgtggtgagtggctgtgatggaatctctgcttgtttgttcctctccgatgatacactctttcttactgccttcgacgggctcctggagctctgggacctgcagcatggttgtcgggtgctgcagactaaggctcaccagtaccaaatcactggctgctgcctgagcccagactgccggctgctagccaccgtgtgcttgggaggatgcctaaagctgtgggacacagtccgtgggcagctggccttccagcacacctaccccaagtccctgaactgtgttgccttccacccagaggggcaggtaatagccacaggcagctgggctggcagcatcagcttcttccaggtggatgggctcaaagtcaccaaggacctgggggcacccggagcctctatccgtaccttggccttcaatgtgcctgggggggttgtggctgtgggccggctggacagtatggtggagctgtgggcctggcgagaaggggcacggctggctgccttccctgcccaccatggctttgttgctgctgcgcttttcctgcatgcgggttgccagttactgacggctggagaggatggcaaggttcaggtgtggtcagggtctctgggtcggccccgtgggcacctgggttccctttctctctctcctgccctctctgtggcactcagcccagatggtgatcgggtggctgttggatatcgagcggatggcattaggatctacaaaatctcttcaggttcccagggggctcagggtcaggcactggatgtggcagtgtccgccctggcctggctaagccccaaggtattggtgagtggtgcagaagatgggtccttgcagggctgggcactcaaggaatgctcccttcagtccctctggctcctgtccagattccagaagcctgtgctaggactggccacttcccaggagctcttggcttctgcctcagaggatttcacagtgcagctgtggccaaggcagctgctgacgcggccacacaaggcagaagactttccctgtggcactgagctgcggggacatgagggccctgtgagctgctgtagtttcagcactgatggaggcagcctggccaccgggggccgggatcggagtctcctctgctgggacgtgaggacacccaaaacccctgttttgatccactccttccctgcctgtcaccgtgactgggtcactggctgtgcctggaccaaagataacctactgatatcctgctccagtgatggctctgtggggctctgggacccagagtcaggacagcggcttggtcagttcctgggtcatcagagtgctgtgagcgctgtggcagctgtggaggagcacgtggtgtctgtgagccgggatgggaccttgaaagtgtgggaccatcaaggcgtggagctgaccagcatccctgctcactcaggacccattagccactgtgcagctgccatggagccccgtgcagctggacagcctgggtcagagcttctggtggtaaccgtcgggctagatggggccacacggttatggcatccactcttggtgtgccaaacccacaccctcctgggacacagcggcccagtccgtgctgctgctgtttcagaaacctcaggcctcatgctgaccgcctctgaggatggttctgtacggctctggcaggttcctaaggaagcagatgacacatgtataccaaggagttctgcagccgtcactgctgtggcttgggcaccagatggttccatggcagtatctggaaatcaagctggggaactaatcttgtggcaggaagctaaggctgtggccacagcacaggctccaggccacattggtgctctgatctggtcctcggcacacaccttttttgtcctcagtgctgatgagaaaatcagcgagtggcaagtgaaactgcggaagggttcggcacccggaaatttgagtcttcacctgaaccgaattctacaggaggacttaggggtgctgacaagtctggattgggctcctgatggtcactttctcatcttggccaaagcagatttgaagttactttgcatgaagccaggggatgctccatctgaaatctggagcagctatacagaaaatcctatgatattgtccacccacaaggagtatggcatatttgtcctgcagcccaaggatcctggagttctttctttcttgaggcaaaaggaatcaggagagtttgaagagaggctgaactttgatataaacttagagaatcctagtaggaccctaatatcgataactcaagccaaacctgaatctgagtcctcatttttgtgtgccagctctgatgggatcctatggaacctggccaaatgcagcccagaaggagaatggaccacaggtaacatgtggcagaaaaaagcaaacactccagaaacccaaactccagggacagacccatctacctgcagggaatctgatgccagcatggatagtgatgccagcatggatagtgagccaacaccacatctaaagacacggcagcgtagaaagattcactcgggctctgtcacagccctccatgtgctacctgagttgctggtgacagcttcgaaggacagagatgttaagctatgggagagacccagtatgcagctgctgggcctgttccgatgcgaagggtcagtgagctgcctggaaccttggctgggcgctaactccaccctgcagcttgccgtgggagacgtgcagggcaatgtgtactttctgaattgggaatga

SEQ ID NO: 138 - protein, 2627 aa, Homo sapiens
MEKLHGHVSAHPDILSLENRCLAMLPDLQPLEKLHQHVSTHSDILSLKNQCLATLPDLKTMEKPHGYVSAHPDILSLENQCLATLSDLKTMEKPHGHVSAHPDILSLENRCLATLSSLKSTVSASPLFQSLQISHMTQADLYRVNNSNCLLSEPPSWRAQHFSKGLDLSTCPIALKSISATETAQEATLGRWFDSEEKKGAETQMPSYSLSLGEEEEVEDLAVKLTSGDSESHPEPTDHVLQEKKMALLSLLCSTLVSEVNMNNTSDPTLAAIFEICRELALLEPEFILKASLYARQQLNVRNVANNILAIAAFLPACRPHLRRYFCAIVQLPSDWIQVAELYQSLAEGDKNKLVPLPACLRTAMTDKFAQFDEYQLAKYNPRKHRAKRHPRRPPRSPGMEPPFSHRCFPRYIGFLREEQRKFEKAGDTVSEKKNPPRFTLKKLVQRLHIHKPAQHVQALLGYRYPSNLQLFSRSRLPGPWDSSRAGKRMKLSRPETWERELSLRGNKASVWEELIENGKLPFMAMLRNLCNLLRVGISSRHHELILQRLQHAKSVIHSRQFPFRFLNAHDAIDALEAQLRNQALPFPSNITLMRRILTRNEKNRPRRRFLCHLSRQQLRMAMRIPVLYEQLKREKLRVHKARQWKYDGEMLNRYRQALETAVNLSVKHSLPLLPGRTVLVYLTDANADRLCPKSNPQGPPLNYALLLIGMMITRAEQVDVVLCGGDTLKTAVLKAEEGILKTAIKLQAQVQEFDENDGWSLNTFGKYLLSLAGQRVPVDRVILLGQSMDDGMINVAKQLYWQRVNSKCLFVGILLRRVQYLSTDLNPNDVTLSGCTDAILKFIAEHGASHLLEHVGQMDKIFKIPPPPGKTGVQSLRPLEEDTPSPLAPVSQQGWRSIRLFISSTFRDMHGERDLLLRSVLPALQARAAPHRISLHGIDLRWGVTEEETRRNRQLEVCLGEVENAQLFVGILGSRYGYIPPSYNLPDHPHFHWAQQYPSGRSVTEMEVMQFLNRNQRLQPSAQALIYFRDSSFLSSVPDAWKSDFVSESEEAARRISELKSYLSRQKGITCRRYPCEWGGVAAGRPYVGGLEEFGQLVLQDVWNMIQKLYLQPGALLEQPVSIPDDDLVQATFQQLQKPPSPARPRLLQDTVQRLMLPHGRLSLVTGQSGQGKTAFLASLVSALQAPDGAKVASLVFFHFSGARPDQGLALTLLRRLCTYLRGQLKEPGALPSTYRSLVWELQQRLLPKSAESLHPGQTQVLIIDGADRLVDQNGQLISDWIPKKLPRCVHLVLSVSSDAGLGETLEQSQGAHVLALGPLEASARARLVREELALYGKRLEESPFNNQMRLLLVKRESGRPLYLRLVTDHLRLFTLYEQVSERLRTLPATVPLLLQHILSTLEKEHGPDVLPQALTALEVTRSGLTVDQLHGVLSVWRTLPKGTKSWEEAVAAGNSGDPYPMGPFACLVQSLRSLLGEGPLERPGARLCLPDGPLRTAAKRCYGKRPGLEDTAHILIAAQLWKTCDADASGTFRSCPPEALGDLPYHLLQSGNRGLLSKFLTNLHVVAAHLELGLVSRLLEAHALYASSVPKEEQKLPEADVAVFRTFLRQQASILSQYPRLLPQQAANQPLDSPLCHQASLLSRRWHLQHTLRWLNKPRTMKNQQSSSLSLAVSSSPTAVAFSTNGQRAAVGTANGTVYLLDLRTWQEEKSVVSGCDGISACLFLSDDTLFLTAFDGLLELWDLQHGCRVLQTKAHQYQITGCCLSPDCRLLATVCLGGCLKLWDTVRGQLAFQHTYPKSLNCVAFHPEGQVIATGSWAGSISFFQVDGLKVTKDLGAPGASIRTLAFNVPGGVVAVGRLDSMVELWAWREGARLAAFPAHHGFVAAALFLHAGCQLLTAGEDGKVQVWSGSLGRPRGHLGSLSLSPALSVALSPDGDRVAVGYRADGIRIYKISSGSQGAQGQALDVAVSALAWLSPKVLVSGAEDGSLQGWALKECSLQSLWLLSRFQKPVLGLATSQELLASASEDFTVQLWPRQLLTRPHKAEDFPCGTELRGHEGPVSCCSFSTDGGSLATGGRDRSLLCWDVRTPKTPVLIHSFPACHRDWVTGCAWTKDNLLISCSSDGSVGLWDPESGQRLGQFLGHQSAVSAVAAVEEHVVSVSRDGTLKVWDHQGVELTSIPAHSGPISHCAAAMEPRAAGQPGSELLVVTVGLDGATRLWHPLLVCQTHTLLGHSGPVRAAAVSETSGLMLTASEDGSVRLWQVPKEADDTCIPRSSAAVTAVAWAPDGSMAVSGNQAGELILWQEAKAVATAQAPGHIGALIWSSAHTFFVLSADEKISEWQVKLRKGSAPGNLSLHLNRILQEDLGVLTSLDWAPDGHFLILAKADLKLLCMKPGDAPSEIWSSYTENPMILSTHKEYGIFVLQPKDPGVLSFLRQKESGEFEERLNFDINLENPSRTLISITQAKPESESSFLCASSDGILWNLAKCSPEGEWTTGNMWQKKANTPETQTPGTDPSTCRESDASMDSDASMDSEPTPHLKTRQRRKIHSGSVTALHVLPELLVTASKDRDVKLWERPSMQLLGLFRCEGSVSCLEPWLGANSTLQLAVGDVQGNVYFLNWE

SEQ ID NO: 139 - DNA, 7860 bp, Homo sapiens
atggaaaaactccatgggcatgtgtctgcccatccagacatcctctccttggagaaccggtgcctggctatgctccctgacttacagcccttggagaaactacatcagcatgtatctacccactcagatatcctctccttgaagaaccagtgcctagccacgcttcctgacctgaagaccatggaaaaaccacatggatatgtgtctgcccacccagacatcctctccttggagaaccagtgcctggccacactttctgacctgaagaccatggagaaaccacatggacatgtttctgcccacccagacatcctctccttggagaaccggtgcctggccaccctctctagtctaaagagcactgtgtctgccagccccttgttccagagtctacagatatctcacatgacgcaagctgatttgtaccgtgtgaacaacagcaattgcctgctctctgagcctccaagttggagggctcagcatttctctaagggactagacctttcaacctgccctatagccctgaaatccatctctgccacagagacagctcaggaagcaactttgggtcgttggtttgattcagaagagaagaaaggggcagagacccaaatgccttcttatagtctgagcttgggagaggaggaggaggtggaggatctggccgtgaagctcacctctggagactctgaatctcatccagagcctactgaccatgtccttcaggaaaagaagatggctctactgagcttgctgtgctctactctggtctcagaagtaaacatgaacaatacatctgaccccaccctggctgccatttttgaaatctgtcgtgaacttgccctcctggagcctgagtttatcctcaaggcatctttgtatgccaggcagcagctgaacgtccggaatgtggccaataacatcttggccattgctgctttcttgccggcgtgtcgcccccacctgcgacgatatttctgtgccattgtccagctgccttctgactggatccaggtggctgagctttaccagagcctggctgagggagataagaataagctggtgcccctgcccgcctgtctccgtactgccatgacggacaaatttgcccagtttgacgagtaccagctggctaagtacaaccctcggaagcaccgggccaagagacacccccgccggccaccccgctctccagggatggagcctccattttctcacagatgttttccaaggtacatagggtttctcagagaagagcagagaaagtttgagaaggccggtgatacagtgtcagagaaaaagaatcctccaaggttcaccctgaagaagctggttcagcgactgcacatccacaagcctgcccagcacgttcaagccctgctgggttacagatacccctccaacctacagctcttttctcgaagtcgccttcctgggccttgggattctagcagagctgggaagaggatgaagctgtctaggccagagacctgggagcgggagctgagcctacgggggaacaaagcgtcggtctgggaggaactcattgaaaatgggaagcttcccttcatggccatgcttcggaacctgtgcaacctgctgcgggttggaatcagttcccgccaccatgagctcattctccagagactccagcatgcgaagtcggtgatccacagtcggcagtttccattcagatttcttaacgcccatgatgccattgatgccctcgaggctcaactcagaaatcaagcattgccctttccttcgaatataacactgatgaggcggatactaactagaaatgaaaagaaccgtcccaggcggaggtttctttgccacctaagccgtcagcagcttcggatggcaatgaggatacctgtgttgtatgagcagctcaagagggagaagctgagagtacacaaggccagacagtggaaatatgatggtgagatgctgaacaggtaccgacaggccctagagacagctgtgaacctctctgtgaagcacagcctgcccctgctgccaggccgcactgtcttggtctatctgacagatgctaatgcagacaggctctgtccaaagagcaacccacaagggcccccgctgaactatgcactgctgttgattgggatgatgatcacgagggcggagcaggtggacgtcgtgctgtgtggaggtgacactctgaagactgcagtgcttaaggcagaagaaggcatcctgaagactgccatcaagctccaggctcaagtccaggagtttgatgaaaatgatggatggtccctgaatacttttgggaaatacctgctgtctctggctggccaaagggttcctgtggacagggtcatcctccttggccaaagcatggatgatggaatgataaatgtggccaaacagctttactggcagcgtgtgaattccaagtgcctctttgttggtatcctcctaagaagggtacaatacctgtcaacagatttgaatcccaatgatgtgacactctcaggctgtactgatgcgatactgaagttcattgcagagcatggggcctcccatcttctggaacatgtgggccaaatggacaaaatattcaagattccaccacccccaggaaagacaggggtccagtctctccggccactggaagaggacactccaagccccttggctcctgtttcccagcaaggatggcgcagcatccggcttttcatttcatccactttccgagacatgcatggggagcgggacctgctgctgaggtctgtgctgccagcactgcaggcccgagcggcccctcaccgtatcagccttcacggaatcgacctccgctggggcgtcactgaggaggagacccgtaggaacagacaactggaagtgtgccttggggaggtggagaacgcacagctgtttgtggggattctgggctcccgttatggatacattccccccagctacaaccttcctgaccatccacacttccactgggcccagcagtacccttcagggcgctctgtgacagagatggaggtgatgcagttcctgaaccggaaccaacgtctgcagccctctgcccaagctctcatctacttccgggattccagcttcctcagctctgtgccagatgcctggaaatctgactttgtttctgagtctgaagaggccgcacgtcggatctcagaactgaagagctacctaagcagacagaaagggatcacctgccgcagatacccctgtgagtgggggggtgtggcagctggccggccctatgttggcgggctggaggagtttgggcagttggttctgcaggatgtatggaatatgatccagaagctctacctgcagcctggggccctgctggagcagccagtgtccatcccagacgatgacttggtccaggccaccttccagcagctgcagaagccaccgagtcctgcccggccacgccttcttcaggacacagtgcaacggctgatgctgccccacggaaggctgagcctggtgacggggcagtcaggacagggcaagacagccttcctggcatctcttgtgtcagccctgcaggctcctgatggggccaaggtggcatcattagtcttcttccacttttctggggctcgtcctgaccagggtcttgccctcactctgctcagacgcctctgtacctatctgcgtggccaactaaaagagccaggtgccctccccagcacctaccgaagcctggtgtgggagctgcagcagaggctgctgcccaagtctgctgagtccctgcatcctggccagacccaggtcctgatcatcgatggggctgataggttagtggaccagaatgggcagctgatttcagactggatcccaaagaagcttccccggtgtgtacacctggtgctgagtgtgtctagtgatgcaggcctaggggagacccttgagcagagccagggtgcccacgtgctggccttggggcctctggaggcctctgctcgggcccggctggtgagagaggagctggccctgtacgggaagcggctggaggagtcaccatttaacaaccagatgcgactgctgctggtgaagcgggaatcaggccggccgctctacctgcgcttggtcaccgatcacctgaggctcttcacgctgtatgagcaggtgtctgagagactccggaccctgcctgccactgtccccctgctgctgcagcacatcctgagcacactggagaaggagcacgggcctgatgtccttccccaggccttgactgccctagaagtcacacggagtggtttgactgtggaccagctgcacggagtgctgagtgtgtggcggacactaccgaaggggactaagagctgggaagaagcagtggctgctggtaacagtggagacccctaccccatgggcccgtttgcctgcctcgtccagagtctgcgcagtttgctaggggagggccctctggagcgccctggtgcccggctgtgcctccctgatgggcccctgagaacagcagctaaacgttgctatgggaagaggccagggctagaggacacggcacacatcctcattgcagctcagctctggaagacatgtgacgctgatgcctcaggcaccttccgaagttgccctcctgaggctctgggagacctgccttaccacctgctccagagcgggaaccgtggacttctttcgaagttccttaccaacctccatgtggtggctgcacacttggaattgggtctggtctctcggctcttggaggcccatgccctctatgcttcttcagtccccaaagaggaacaaaagctccccgaggctgacgttgcagtgtttcgcaccttcctgaggcagcaggcttcaatcctcagccagtacccccggctcctgccccagcaggcagccaaccagcccctggactcacctctttgccaccaagcctcgctgctctcccggagatggcacctccaacacacactacgatggcttaataaaccccggaccatgaaaaatcagcaaagctccagcctgtctctggcagtttcctcatcccctactgctgtggccttctccaccaatgggcaaagagcagctgtgggcactgccaatgggacagtttacctgttggacctgagaacttggcaggaggagaagtctgtggtgagtggctgtgatggaatctctgcttgtttgttcctctccgatgatacactctttcttactgccttcgacgggctcctggagctctgggacctgcagcatggttgtcgggtgctgcagactaaggctcaccagtaccaaatcactggctgctgcctgagcccagactgccggctgctagccaccgtgtgcttgggaggatgcctaaagctgtgggacacagtccgtgggcagctggccttccagcacacctaccccaagtccctgaactgtgttgccttccacccagaggggcaggtaatagccacaggcagctgggctggcagcatcagcttcttccaggtggatgggctcaaagtcaccaaggacctgggggcacccggagcctctatccgtaccttggccttcaatgtgcctgggggggttgtggctgtgggccggctggacagtatggtggagctgtgggcctggcgagaaggggcacggctggctgccttccctgcccaccatggctttgttgctgctgcgcttttcctgcatgcgggttgccagttactgacggctggagaggatggcaaggttcaggtgtggtcagggtctctgggtcggccccgtgggcacctgggttccctttctctctctcctgccctctctgtggcactcagcccagatggtgatcgggtggctgttggatatcgagcggatggcattaggatctacaaaatctcttcaggttcccagggggctcagggtcaggcactggatgtggcagtgtccgccctggcctggctaagccccaaggtattggtgagtggtgcagaagatgggtccttgcagggctgggcactcaaggaatgctcccttcagtccctctggctcctgtccagattccagaagcctgtgctaggactggccacttcccaggagctcttggcttctgcctcagaggatttcacagtgcagctgtggccaaggcagctgctgacgcggccacacaaggcagaagactttccctgtggcactgagctgcggggacatgagggccctgtgagctgctgtagtttcagcactgatggaggcagcctggccaccgggggccgggatcggagtctcctctgctgggacgtgaggacacccaaaacccctgttttgatccactccttccctgcctgtcaccgtgactgggtcactggctgtgcctggaccaaagataacctactgatatcctgctccagtgatggctctgtggggctctgggacccagagtcaggacagcggcttggtcagttcctgggtcatcagagtgctgtgagcgctgtggcagctgtggaggagcacgtggtgtctgtgagccgggatgggaccttgaaagtgtgggaccatcaaggcgtggagctgaccagcatccctgctcactcaggacccattagccactgtgcagctgccatggagccccgtgcagctggacagcctgggtcagagcttctggtggtaaccgtcgggctagatggggccacacggttatggcatccactcttggtgtgccaaacccacaccctcctgggacacagcggcccagtccgtgctgctgctgtttcagaaacctcaggcctcatgctgaccgcctctgaggatggttctgtacggctctggcaggttcctaaggaagcagatgacacatgtataccaaggagttctgcagccgtcactgctgtggcttgggcaccagatggttccatggcagtatctggaaatcaagctggggaactaatcttgtggcaggaagctaaggctgtggccacagcacaggctccaggccacattggtgctctgatctggtcctcggcacacaccttttttgtcctcagtgctgatgagaaaatcagcgagtggcaagtgaaactgcggaagggttcggcacccggaaatttgagtcttcacctgaaccgaattctacaggaggacttaggggtgctgacaagtctggattgggctcctgatggtcactttctcatcttggccaaagcagatttgaagttactttgcatgaagccaggggatgctccatctgaaatctggagcagctatacagaaaatcctatgatattgtccacccacaaggagtatggcatatttgtcctgcagcccaaggatcctggagttctttctttcttgaggcaaaaggaatcaggagagtttgaagagaggctgaactttgatataaacttagagaatcctagtaggaccctaatatcgataactcaagccaaacctgaatctgctctgatgggatcctatggaacctggccaaatgcagcccagaaggagaatggaccacaggtaacatgtggcagaaaaaagaacactccagaaacccaaactccagggacagacccatctacctgcagggaatctgatgccagcatggatagtgatgccagcatggatagtgagccaacaccacatctaaagacacggcagcgtagaaagattcactcgggctctgtcacagccctccatgtgctacctgagttgctggtgacagcttcgaaggacagagatgttaagctatgggagagacccagtatgcagctgctgggcctgttccgatgcgaagggtcagtgagctgcctggaaccttggctgggcgctaactccaccctgcagcttgccgtgggagacgtgcagggcaatgtgtactttctgaattgggaatga

SEQ ID NO: 140 - protein, 2619 aa, Homo sapiens
MEKLHGHVSAHPDILSLENRCLAMLPDLQPLEKLHQHVSTHSDILSLKNQCLATLPDLKTMEKPHGYVSAHPDILSLENQCLATLSDLKTMEKPHGHVSAHPDILSLENRCLATLSSLKSTVSASPLFQSLQISHMTQADLYRVNNSNCLLSEPPSWRAQHFSKGLDLSTCPIALKSISATETAQEATLGRWFDSEEKKGAETQMPSYSLSLGEEEEVEDLAVKLTSGDSESHPEPTDHVLQEKKMALLSLLCSTLVSEVNMNNTSDPTLAAIFEICRELALLEPEFILKASLYARQQLNVRNVANNILAIAAFLPACRPHLRRYFCAIVQLPSDWIQVAELYQSLAEGDKNKLVPLPACLRTAMTDKFAQFDEYQLAKYNPRKHRAKRHPRRPPRSPGMEPPFSHRCFPRYIGFLREEQRKFEKAGDTVSEKKNPPRFTLKKLVQRLHIHKPAQHVQALLGYRYPSNLQLFSRSRLPGPWDSSRAGKRMKLSRPETWERELSLRGNKASVWEELIENGKLPFMAMLRNLCNLLRVGISSRHHELILQRLQHAKSVIHSRQFPFRFLNAHDAIDALEAQLRNQALPFPSNITLMRRILTRNEKNRPRRRFLCHLSRQQLRMAMRIPVLYEQLKREKLRVHKARQWKYDGEMLNRYRQALETAVNLSVKHSLPLLPGRTVLVYLTDANADRLCPKSNPQGPPLNYALLLIGMMITRAEQVDVVLCGGDTLKTAVLKAEEGILKTAIKLQAQVQEFDENDGWSLNTFGKYLLSLAGQRVPVDRVILLGQSMDDGMINVAKQLYWQRVNSKCLFVGILLRRVQYLSTDLNPNDVTLSGCTDAILKFIAEHGASHLLEHVGQMDKIFKIPPPPGKTGVQSLRPLEEDTPSPLAPVSQQGWRSIRLFISSTFRDMHGERDLLLRSVLPALQARAAPHRISLHGIDLRWGVTEEETRRNRQLEVCLGEVENAQLFVGILGSRYGYIPPSYNLPDHPHFHWAQQYPSGRSVTEMEVMQFLNRNQRLQPSAQALIYFRDSSFLSSVPDAWKSDFVSESEEAARRISELKSYLSRQKGITCRRYPCEWGGVAAGRPYVGGLEEFGQLVLQDVWNMIQKLYLQPGALLEQPVSIPDDDLVQATFQQLQKPPSPARPRLLQDTVQRLMLPHGRLSLVTGQSGQGKTAFLASLVSALQAPDGAKVASLVFFHFSGARPDQGLALTLLRRLCTYLRGQLKEPGALPSTYRSLVWELQQRLLPKSAESLHPGQTQVLIIDGADRLVDQNGQLISDWIPKKLPRCVHLVLSVSSDAGLGETLEQSQGAHVLALGPLEASARARLVREELALYGKRLEESPFNNQMRLLLVKRESGRPLYLRLVTDHLRLFTLYEQVSERLRTLPATVPLLLQHILSTLEKEHGPDVLPQALTALEVTRSGLTVDQLHGVLSVWRTLPKGTKSWEEAVAAGNSGDPYPMGPFACLVQSLRSLLGEGPLERPGARLCLPDGPLRTAAKRCYGKRPGLEDTAHILIAAQLWKTCDADASGTFRSCPPEALGDLPYHLLQSGNRGLLSKFLTNLHVVAAHLELGLVSRLLEAHALYASSVPKEEQKLPEADVAVFRTFLRQQASILSQYPRLLPQQAANQPLDSPLCHQASLLSRRWHLQHTLRWLNKPRTMKNQQSSSLSLAVSSSPTAVAFSTNGQRAAVGTANGTVYLLDLRTWQEEKSVVSGCDGISACLFLSDDTLFLTAFDGLLELWDLQHGCRVLQTKAHQYQITGCCLSPDCRLLATVCLGGCLKLWDTVRGQLAFQHTYPKSLNCVAFHPEGQVIATGSWAGSISFFQVDGLKVTKDLGAPGASIRTLAFNVPGGVVAVGRLDSMVELWAWREGARLAAFPAHHGFVAAALFLHAGCQLLTAGEDGKVQVWSGSLGRPRGHLGSLSLSPALSVALSPDGDRVAVGYRADGIRIYKISSGSQGAQGQALDVAVSALAWLSPKVLVSGAEDGSLQGWALKECSLQSLWLLSRFQKPVLGLATSQELLASASEDFTVQLWPRQLLTRPHKAEDFPCGTELRGHEGPVSCCSFSTDGGSLATGGRDRSLLCWDVRTPKTPVLIHSFPACHRDWVTGCAWTKDNLLISCSSDGSVGLWDPESGQRLGQFLGHQSAVSAVAAVEEHVVSVSRDGTLKVWDHQGVELTSIPAHSGPISHCAAAMEPRAAGQPGSELLVVTVGLDGATRLWHPLLVCQTHTLLGHSGPVRAAAVSETSGLMLTASEDGSVRLWQVPKEADDTCIPRSSAAVTAVAWAPDGSMAVSGNQAGELILWQEAKAVATAQAPGHIGALIWSSAHTFFVLSADEKISEWQVKLRKGSAPGNLSLHLNRILQEDLGVLTSLDWAPDGHFLILAKADLKLLCMKPGDAPSEIWSSYTENPMILSTHKEYGIFVLQPKDPGVLSFLRQKESGEFEERLNFDINLENPSRTLISITQAKPESALMGSYGTWPNAAQKENGPQVTCGRKKNTPETQTPGTDPSTCRESDASMDSDASMDSEPTPHLKTRQRRKIHSGSVTALHVLPELLVTASKDRDVKLWERPSMQLLGLFRCEGSVSCLEPWLGANSTLQLAVGDVQGNVYFLNWE

SEQ ID NO: 141 - DNA, 2559 bp, Homo sapiens
atgagtggaagagcccgagtgaaggccagaggcatcgcccgcagccccagtgccacagaagtggggcgcatccaagcctcgccattgcctagatctgttgatcttagtaacaatgaagcatcctctagcaatggcttcttgggaacaagcaggatctcaaccaacgataaatatgggatatcttctggtgatgctggaagtaccttcatggaaagaggtgtgaaaaacaaacaggactttatggatttgagtatctgtaccagagaaaaattggcacatgtgagaaattgtaaaacaggttccagtggaatacctgtgaaactggttacaaacctctttaacttagattttccccaagactggcagctataccagtaccatgtgacatatattccagatttagcatctagaaggctgagaattgctttactttatagtcatagtgaactttccaacaaagcaaaagcattcgacggtgccatcctttttctgtcacaaaagctagaagaaaaggtcacagagttgtcaagtgaaactcaaagaggtgagactataaagatgactatcaccctgaagagggagctgccatcaagttctcccgtgtgcatccaggtcttcaatatcatcttcagaaagatcctcaaaaagttgtccatgtaccaaattggacggaacttctataatccttcagagccaatggaaattccccagcacaaattatccctttggcctgggtttgccatttctgtgtcatattttgaaaggaagctcctgtttagtgctgatgtgagttacaaagtcctccggaatgagacggttctggaattcatgactgctctctgtcaaagaactggcttgtcctgtttcacccagacgtgtgagaagcagctaatagggctcattgtccttacaagatacaataacagaacctactccattgatgacattgactggtcagtgaagcccacacacacctttcagaagcgggatggcaccgagatcacctatgtggattactacaagcagcagtatgatattactgtatcggacctgaatcagcccatgcttgttagtctgttaaagaagaagagaaatgacaacagtgaggctcagctcgcccacctgatacctgagctctgctttctaacagggctgactgaccaggcaacatctgatttccagctgatgaaggctgtggctgaaaagacacgtctcagtccttcaggccggcagcagcgcctggccaggcttgtggacaacatccagaggaataccaatgctcgctttgaactagagacctggggactgcattttggaagccagatatctctgactggccggattgtgccttcagaaaaaatattaatgcaagaccacatatgtcaacctgtgtctgctgctgactggtccaaggatattcgaacttgcaagattttaaatgcacagtctttgaatacctggttgattttatgtagcgacagaactgaatatgttgccgagagctttctgaactgcttgagaagagttgcaggttccatgggatttaatgtggactaccccaaaatcataaaagtacaagaaaatccagctgcatttgttagagctatacagcaatatgttgatcctgatgttcagctggtaatgtgcattctgccttctaatcagaagacctattatgattccattaaaaaatatttgagctcagactgcccagtcccaagccaatgtgtgcttgctcggaccttgaataaacagggcatgatgatgagtatcgccaccaagatcgctatgcagatgacttgcaagctcggaggcgagctgtgggctgtggaaatacctttaaagtccctgatggtggtcggtattgatgtctgtaaagatgcactcagcaaggacgtgatggttgttggatgcgtggccagtgttaaccccagaatcaccaggtggttttcccgctgtatccttcagagaacaatgactgatgttgcagattgcttgaaagttttcatgactggagcactcaacaaatggtacaagtacaatcatgatttgccagcacggataattgtgtaccgtgctggtgtaggggatggtcagctgaaaacacttattgaatatgaagtcccacagctgctgagcagtgtggcagaatccagctcaaataccagctcaagactgtcggtgattgtggtcaggaagaagtgcatgccacgattctttaccgaaatgaaccgcactgtacagaaccccccacttggcactgttgtggattcagaagcaacacgtaacgaatggtatgacttttatctgatcagccaggtggcctgccggggaactgttagtcctacctactataatgtcatctatgatgacaacggcttgaagcccgaccatatgcagagacttacattcaaattgtgccacctgtactacaactggccgggcatagtcagtgtcccagcaccatgtcagtatgctcacaagctgacctttctggtggcacaaagcattcataaagaacccagtctggaattagccaaccatctcttctacctgtga

SEQ ID NO: 142 - protein, 852 aa, Homo sapiens
MSGRARVKARGIARSPSATEVGRIQASPLPRSVDLSNNEASSSNGFLGTSRISTNDKYGISSGDAGSTFMERGVKNKQDFMDLSICTREKLAHVRNCKTGSSGIPVKLVTNLFNLDFPQDWQLYQYHVTYIPDLASRRLRIALLYSHSELSNKAKAFDGAILFLSQKLEEKVTELSSETQRGETIKMTITLKRELPSSSPVCIQVFNIIFRKILKKLSMYQIGRNFYNPSEPMEIPQHKLSLWPGFAISVSYFERKLLFSADVSYKVLRNETVLEFMTALCQRTGLSCFTQTCEKQLIGLIVLTRYNNRTYSIDDIDWSVKPTHTFQKRDGTEITYVDYYKQQYDITVSDLNQPMLVSLLKKKRNDNSEAQLAHLIPELCFLTGLTDQATSDFQLMKAVAEKTRLSPSGRQQRLARLVDNIQRNTNARFELETWGLHFGSQISLTGRIVPSEKILMQDHICQPVSAADWSKDIRTCKILNAQSLNTWLILCSDRTEYVAESFLNCLRRVAGSMGFNVDYPKIIKVQENPAAFVRAIQQYVDPDVQLVMCILPSNQKTYYDSIKKYLSSDCPVPSQCVLARTLNKQGMMMSIATKIAMQMTCKLGGELWAVEIPLKSLMVVGIDVCKDALSKDVMVVGCVASVNPRITRWFSRCILQRTMTDVADCLKVFMTGALNKWYKYNHDLPARIIVYRAGVGDGQLKTLIEYEVPQLLSSVAESSSNTSSRLSVIVVRKKCMPRFFTEMNRTVQNPPLGTVVDSEATRNEWYDFYLISQVACRGTVSPTYYNVIYDDNGLKPDHMQRLTFKLCHLYYNWPGIVSVPAPCQYAHKLTFLVAQSIHKEPSLELANHLFYL

SEQ ID NO: 143 - DNA, 1479 bp, Homo sapiens
ggacctagatctgttgatcttagtaacaatgaagcatcctctagcaatggcttcttgggaacaagcaggatctcaaccaacgataaatatgggatatcttctggtgatgctggaagtaccttcatggaaagaggtgtgaaaaacaaacaggactttatggatttgagtatctgtaccagagaaaaattggcacatgtgagaaattgtaaaacaggttccagtggaatacctgtgaaactggttacaaacctctttaacttagattttccccaagactggcagctataccagtaccatgtgacatatattccagatttagcatctagaaggctgagaattgctttactttatagtcatagtgaactttccaacaaagcaaaagcattcgacggtgccatcctttttctgtcacaaaagctagaagaaaaggtcacagagttgtcaagtgaaactcaaagaggtgagactataaagatgactatcaccctgaagagggagctgccatcaagttctcccgtgtgcatccaggtcttcaatatcatcttcagaaagatcctcaaaaagttgtccatgtaccaaattggacggaacttctataatccttcagagccaatggaaattccccagcacaaattatccctttggcctgggtttgccatttctgtgtcatattttgaaaggaagctcctgtttagtgctgatgtgagttacaaagtcctccggaatgagacggttctggaattcatgactgctctctgtcaaagaactggcttgtcctgtttcacccagacgtgtgagaagcagctaatagggctcattgtccttacaagatacaataacagaacctactccattgatgacattgactggtcagtgaagcccacacacacctttcagaagcgggatggcaccgagatcacctatgtggattactacaagcagcagtatgatattactgtatcggacctgaatcagcccatgcttgttagtctgttaaagaagaagagaaatgacaacagtgaggctcagctcgcccacctgatacctgagctctgctttctaacagggctgactgaccaggcaacatctgatttccagctgatgaaggctgtggctgaaaagacacgtctcagtccttcaggccggcagcagcgcctggccaggcttgtggacaacatccagaggaataccaatgctcgctttgaactagagacctggggactgcattttggaagccagatatctctgactggccggattgtgccttcagaaaaaatattaatgcaagaccacatatgtcaacctgtgtctgctgctgactggtccaaggatattcgaacttgcaagattttaaatgcacagtctttgaatacctggttgattttatgtagcgacagaactgaatatgttgccgagagctttctgaactgcttgagaagagttgcaggttccatgggatttaatgtggactaccccaaa

SEQ ID NO: 144 - protein, 493 aa, Homo sapiens
GPRSVDLSNNEASSSNGFLGTSRISTNDKYGISSGDAGSTFMERGVKNKQDFMDLSICTREKLAHVRNCKTGSSGIPVKLVTNLFNLDFPQDWQLYQYHVTYIPDLASRRLRIALLYSHSELSNKAKAFDGAILFLSQKLEEKVTELSSETQRGETIKMTITLKRELPSSSPVCIQVFNIIFRKILKKLSMYQIGRNFYNPSEPMEIPQHKLSLWPGFAISVSYFERKLLFSADVSYKVLRNETVLEFMTALCQRTGLSCFTQTCEKQLIGLIVLTRYNNRTYSIDDIDWSVKPTHTFQKRDGTEITYVDYYKQQYDITVSDLNQPMLVSLLKKKRNDNSEAQLAHLIPELCFLTGLTDQATSDFQLMKAVAEKTRLSPSGRQQRLARLVDNIQRNTNARFELETWGLHFGSQISLTGRIVPSEKILMQDHICQPVSAADWSKDIRTCKILNAQSLNTWLILCSDRTEYVAESFLNCLRRVAGSMGFNVDYPK

SEQ ID NO: 145 - DNA, 1083 bp, Homo sapiens
atgcccaagttcaaacaacgaagacgaaagctaaaagccaaagccgaaagattattcaaaaaaaaagaagcctctcactttcagtccaagctaattacacctcctcctccaccaccctcaccagaaagagtcggtatttcttcaatagatatatctcaaagcagaagctggctaacatcatcctggaacttcaattttcctaacatcagagatgcaataaaactttggacaaatagagtatggtctatatacagctggtgccagaactgcataacccagagtttagaagtattgaaagacaccatctttccatctcgtatctgccaccgagaactttacagtgtaaaacaacagttttgcattttggaaagtaaattatgcaagctccaggaagcactgaagaccatctcagaaagttcttcctgtccaagctgtggtcaaacatgtcacatgagtggtaaacttacaaatgtgcctgcctgcgttctgatcacccctggagactccaaagctgtgcttcctcccacactgccacagccagccagccattttcctcctcctcctccacctccacctctgccacctcctccaccaccactagcacctgtgttgctcagaaaacccagtctcgctaaagcacttcaggctggaccattaaaaaaagatggacccatgcagataacagttaaagatctgctgactgtaaaattaaagaagacacagagtttagatgaaaagaggaagcttataccatcgccgaaagcacggaatccactagttaccgtctctgacttgcagcatgttaccctgaaacctaactccaaagtgttatcgactcgagttacaaacgtcttaatcactcctggaaaaagtcagatggatctgcggaaactgcttagaaaagtcgatgtagagaggagcccaggtggaacccctcttaccaataaggaaaatatggaaacaggaacaggactgactccagtgatgacgcaggccttaaggagaaagtttcagctggctcaccctagaagcccaactccaactctgccactttctacaagcagctttgatgaacaaaactga

SEQ ID NO: 146 - protein, 360 aa, Homo sapiens
MPKFKQRRRKLKAKAERLFKKKEASHFQSKLITPPPPPPSPERVGISSIDISQSRSWLTSSWNFNFPNIRDAIKLWTNRVWSIYSWCQNCITQSLEVLKDTIFPSRICHRELYSVKQQFCILESKLCKLQEALKTISESSSCPSCGQTCHMSGKLTNVPACVLITPGDSKAVLPPTLPQPASHFPPPPPPPPLPPPPPPLAPVLLRKPSLAKALQAGPLKKDGPMQITVKDLLTVKLKKTQSLDEKRKLIPSPKARNPLVTVSDLQHVTLKPNSKVLSTRVTNVLITPGKSQMDLRKLLRKVDVERSPGGTPLTNKENMETGTGLTPVMTQALRRKFQLAHPRSPTPTLPLSTSSFDEQN

SEQ ID NO: 147 - DNA, 657 bp, Homo sapiens
atgagcagcggggcggcgtccgggacagggcgggggcggccccggggcgggggacctgggcccggggaccccccgcccagcgagacacacaagctggtggtcgtgggcggcggcggcgtgggcaagagcgcgctgaccatccagttcatccagtcctacttcgtgtctgactacgaccccactattgaggactcctacacgaagatctgcagtgtggatggcatcccagcccggctggacatcctggacaccgcgggccaggaagagttcggggccatgagagagcagtacatgcgtgctggccacggcttcctgctggtgttcgccattaacgaccggcagagtttcaacgaggtgggcaagctcttcacgcagattctgcgggtcaaggaccgcgacgacttccccgttgtgttggtcgggaacaaggcagatctggagtcacagcgccaggtcccccgatcagaagcctctgccttcggcgcctcccaccacgtggcctactttgaggcctcggccaaactgcgtctcaacgtggacgaggcttttgagcagctggtgcgggctgtccggaaataccaggaacaagagctcccaccgagccctcccagtgcccccaggaagaagggcgggggctgcccctgcgtcctcctgtag

SEQ ID NO: 148 - protein, 218 aa, Homo sapiens
MSSGAASGTGRGRPRGGGPGPGDPPPSETHKLVVVGGGGVGKSALTIQFIQSYFVSDYDPTIEDSYTKICSVDGIPARLDILDTAGQEEFGAMREQYMRAGHGFLLVFAINDRQSFNEVGKLFTQILRVKDRDDFPVVLVGNKADLESQRQVPRSEASAFGASHHVAYFEASAKLRLNVDEAFEQLVRAVRKYQEQELPPSPPSAPRKKGGGCPCVLL

SEQ ID NO: 149 - DNA, 8307 bp, Homo sapiens
atggccctggtcctggagatcttcaccctgctggcctccatctgctgggtgtcggccaatatcttcgagtaccaggtggatgcccagccccttcgtccctgtgagctgcagagggaaacggcctttctgaagcaagcagactacgtgccccagtgtgcagaggatggcagcttccagactgtccagtgccagaacgacggccgctcctgctggtgtgtgggtgccaacggcagtgaagtgctgggcagcaggcagccaggacggcctgtggcttgtctgtcattttgtcagctacagaaacagcagatcttactgagtggctacattaacagcacagacacctcctacctccctcagtgtcaggattcaggggactacgcgcctgttcagtgtgatgtgcagcaggtccagtgctggtgtgtggacgcagaggggatggaggtgtatgggacccgccagctggggaggccaaagcgatgtccaaggagctgtgaaataagaaatcgtcgtcttctccacggggtgggagataagtcaccaccccagtgttctgcggagggagagtttatgcctgtccagtgcaaatttgtcaacaccacagacatgatgatttttgatctggtccacagctacaacaggtttccagatgcatttgtgaccttcagttccttccagaggaggttccctgaggtatctgggtattgccactgtgctgacagccaagggcgggaactggctgagacaggtttggagttgttactggatgaaatttatgacaccatttttgctggcctggaccttccttccaccttcactgaaaccaccctgtaccggatactgcagagacggttcctcgcagttcaatcagtcatctctggcagattccgatgccccacaaaatgtgaagtggagcggtttacagcaaccagctttggtcacccctatgttccaagctgccgccgaaatggcgactatcaggcggtgcagtgccagacggaagggccctgctggtgtgtggacgcccaggggaaggaaatgcatggaacccggcagcaaggggagccgccatcttgtgctgaaggccaatcttgtgcctccgaaaggcagcaggccttgtccagactctactttgggacctcaggctacttcagccagcacgacctgttctcttccccagagaaaagatgggcctctccaagagtagccagatttgccacatcctgcccacccacgatcaaggagctctttgtggactctgggcttctccgcccaatggtggagggacagagccaacagttttctgtctcagaaaatcttctcaaagaagccatccgagcaatttttccctcccgagggctggctcgtcttgcccttcagtttaccaccaacccaaagagactccagcaaaacctttttggagggaaatttttggtgaatgttggccagtttaacttgtctggagcccttggcacaagaggcacatttaacttcagtcaatttttccagcaacttggtcttgcaagcttcttgaatggagggagacaagaagatttggccaagccactctctgtgggattagattcaaattcttccacaggaacccctgaagctgctaagaaggatggtactatgaataagccaactgtgggcagctttggctttgaaattaacctacaagagaaccaaaatgccctcaaattccttgcttctctcctggagcttccagaattccttctcttcttgcaacatgctatctctgtgccagaagatgtggcaagagatttaggtgatgtgatggaaacggtactcagctcccagacctgtgagcagacacctgaaaggctatttgtcccatcatgcacgacagaaggaagctatgaggatgtccaatgcttttccggagagtgctggtgtgtgaattcctggggcaaagagcttccaggctcaagagtcagaggtggacagccaaggtgccccacagactgtgaaaagcaaagggctcgcatgcaaagcctcatgggcagccagcctgctggctccaccttgtttgtccctgcttgtactagtgagggacatttcctgcctgtccagtgcttcaactcagagtgctactgtgttgatgctgagggtcaggccattcctggaactcgaagtgcaatagggaagcccaagaaatgccccacgccctgtcaattacagtctgagcaagctttcctcaggacggtgcaggccctgctctctaactccagcatgctacccaccctttccgacacctacatcccacagtgcagcaccgatgggcagtggagacaagtgcaatgcaatgggcctcctgagcaggtcttcgagttgtaccaacgatgggaggctcagaacaagggccaggatctgacgcctgccaagctgctagtgaagatcatgagctacagagaagcagcttccggaaacttcagtctctttattcaaagtctgtatgaggctggccagcaagatgtcttcccggtgctgtcacaatacccttctctgcaagatgtcccactagcagcactggaagggaaacggccccagcccagggagaatatcctcctggagccctacctcttctggcagatcttaaatggccaactcagccaatacccggggtcctactcagacttcagcactcctttggcacattttgatcttcggaactgctggtgtgtggatgaggctggccaagaactggaaggaatgcggtctgagccaagcaagctcccaacatgtcctggctcctgtgaggaagcaaagctccgtgtactgcagttcattagggaaacggaagagattgtttcagcttccaacagttctcggttccctctgggggagagtttcctggtggccaagggaatccggctgaggaatgaggacctcggccttcctccgctcttcccgccccgggaggctttcgcggagcagtttctgcgtgggagtgattacgccattcgcctggcggctcagtctaccttaagcttctatcagagacgccgcttttccccggacgactcggctggagcatccgcccttctgcggtcgggcccctacatgccacagtgtgatgcgtttggaagttgggagcctgtgcagtgccacgctgggactgggcactgctggtgtgtagatgagaaaggagggttcatccctggctcactgactgcccgctctctgcagattccacagtgcccgacaacctgcgagaaatctcgaaccagtgggctgctttccagttggaaacaggctagatcccaagaaaacccatctccaaaagacctgttcgtcccagcctgcctagaaacaggagagtatgccaggctgcaggcatcgggggctggcacctggtgtgtggaccctgcatcaggagaagagttgcggcctggctcgagcagcagtgcccagtgcccaagcctctgcaatgtgctcaagagtggagtcctctccaggagagtcagcccaggctatgtcccagcctgcagggcagaggatgggggcttttccccagtgcaatgtgaccaggcccagggcagctgctggtgtgtcatggacagcggagaagaggtgcctgggacgcgcgtgaccgggggccagcccgcctgtgagagcccgcggtgtccgctgccattcaacgcgtcggaggtggttggtggaacaatcctgtgtgagacaatctcgggccccacaggctctgccatgcagcagtgccaattgctgtgccgccagggctcctggagcgtgtttccaccagggccattgatatgtagcctggagagcggacgctgggagtcacagctgcctcagccccgggcctgccaacggccccagctgtggcagaccatccagacccaagggcactttcagctccagctcccgccgggcaagatgtgcagtgctgactacgcggatttgctgcagactttccaggttttcatattggatgagctgacagcccgcggcttctgccagatccaggtgaagacttttggcaccctggtttccattcctgtctgcaacaactcctctgtgcaggtgggttgtctgaccagggagcgtttaggagtgaatgttacatggaaatcacggcttgaggacatcccagtggcttctcttcctgacttacatgacattgagagagccttggtgggcaaggatctccttgggcgcttcacagatctgatccagagtggctcattccagcttcatctggactccaagacgttcccagcggaaaccatccgcttcctccaaggggaccactttggcacctctcccaggacatggtttgggtgctcggaaggattctaccaagtcttgacaagtgaggccagtcaggacggactgggatgcgttaagtgtcctgaaggaagctattcccaagatgaggaatgcattccttgtcctgttggattctaccaagaacaggcagggagcttggcctgtgtcccatgtcctgtgggcagaacgaccatttctgctggagctttcagccagactcactgtgtcactgactgtcagaggaacgaagcaggcctgcaatgtgaccagaatggccagtatcgagccagccagaaggacaggggcagtgggaaggccttctgtgtggacggcgaggggcggaggctgccatggtgggaaacagaggcccctcttgaggactcacagtgtttgatgatgcagaagtttgagaaggttccagaatcaaaggtgatcttcgacgccaatgctcctgtggctgtcagatccaaagttcctgattctgagttccccgtgatgcagtgcttgacagattgcacagaggacgaggcctgcagcttcttcaccgtgtccacgacggagccagagatttcctgtgatttctatgcttggacaagtgacaatgttgcctgcatgacttctgaccagaaacgagatgcactggggaactcaaaggccaccagctttggaagtcttcgctgccaggtgaaagtgaggagccatggtcaagattctccagctgtgtatttgaaaaagggccaaggatccaccacaacacttcagaaacgctttgaacccactggtttccaaaacatgctttctggattgtacaaccccattgtgttctcagcctcaggagccaatctaaccgatgctcacctcttctgtcttcttgcatgcgaccgtgatctgtgttgcgatggcttcgtcctcacacaggttcaaggaggtgccatcatctgtgggttgctgagctcacccagtgtcctgctttgtaatgtcaaagactggatggatccctctgaagcctgggctaatgctacatgtcctggtgtgacatatgaccaggagagccaccaggtgatattgcgtcttggagaccaggagttcatcaagagtctgacacccttagaaggaactcaagacacctttaccaattttcagcaggtttatctctggaaagattctgacatggggtctcggcctgagtctatgggatgtagaaaagacacagtgccaaggccagcatctccaacagaagcaggtttgacaacagaacttttctcccctgtggacctcaaccaggtcattgtcaatggaaatcaatcactatccagccagaagcactggcttttcaagcacctgttttcagcccagcaggcaaacctatggtgcctttctcgttgtgtgcaggagcactctttctgtcagctcgcagagataacagagagtgcatccttgtacttcacctgcaccctctacccagaggcacaggtgtgtgatgacatcatggagtccaatgcccagggctgcagactgatcctgcctcagatgccaaaggccctgttccggaagaaagttatactggaagataaagtgaagaacttttacactcgcctgccgttccaaaaactgatggggatatccattagaaataaagtgcccatgtctgaaaaatctatttctaatgggttctttgaatgtgaacgacggtgcgatgcggacccatgctgcactggctttggatttctaaatgtttcccagttaaaaggaggagaggtgacatgtctcactctgaacagcttgggaattcagatgtgcagtgaggagaatggaggagcctggcgcattttggactgtggctctcctgacattgaagtccacacctatcccttcggatggtaccagaagcccattgctcaaaataatgctcccagtttttgccctttggttgttctgccttccctcacagagaaagtgtctctggactcgtggcagtccctggccctctcttcagtggttgttgatccatccattaggcactttgatgttgcccatgtcagcactgctgccaccagcaatttctctgctgtccgagacctctgtttgtcggaatgttcccaacatgaggcctgtctcatcaccactctgcaaacccaacctggggctgtgagatgtatgttctatgctgatactcaaagctgcacacatagtctgcagggtcagaactgccgacttctgcttcgtgaagaggccacccacatctaccggaagccaggaatctctctgctcagctatgaggcatctgtaccttctgtgcccatttccacccatggccggctgctgggcaggtcccaggccatccaggtgggtacctcatggaagcaagtggaccagttccttggagttccatatgctgccccgcccctggcagagaggcgcttccaggcaccagagcccttgaactggacaggctcctgggatgccagcaagccaagggccagctgctggcagccaggcaccagaacatccacgtctcctggagtcagtgaagattgtttgtatctcaatgtgttcatccctcagaatgtggcccctaacgcgtctgtgctggtgttcttccacaacaccatggacagggaggagagtgaaggatggccggctatcgacggctccttcttggctgctgttggcaacctcatcgtggtcactgccagctaccgagtgggtgtcttcggcttcctgagttctgggtccggagaggtgagtggcaactgggggctgctggaccaggtggcggctctgacctgggtgcagacccacatccgaggatttggcggggaccctcggcgcgtgtccctggcagcagaccgtggcggggctgatgtggccagcatccaccttctcacggccagggccaccaactcccaacttttccggagagctgtgctgatgggaggctccgcactctccccggccgccgtcatcagccatgagagggctcagcagcaggcaattgctttggcaaaggaggtcagttgccccatgtcatccagccaagaagtggtgtcctgcctccgccagaagcctgccaatgtcctcaatgatgcccagaccaagctcctggccgtgagtggccctttccactactggggtcctgtgatcgatggccacttcctccgtgagcctccagccagagcactgaagaggtctttatgggtagaggtcgatctgctcattgggagttctcaggacgacgggctcatcaacagagcaaaggctgtgaagcaatttgaggaaagtcgaggccggaccagtagcaaaacagccttttaccaggcactgcagaattctctgggtggcgaggactcagatgcccgcgtcgaggctgctgctacatggtattactctctggagcactccacggatgactatgcctccttctcccgggctctggagaatgccacccgggactactttatcatctgccctataatcgacatggccagtgcctgggcaaagagggcccgaggaaacgtcttcatgtaccatgctcctgaaaactacggccatggcagcctggagctgctggcggatgttcagtttgccttggggcttcccttctacccagcctacgaggggcagttttctctggaggagaagagcctgtcgctgaaaatcatgcagtacttttcccacttcatcagatcaggaaatcccaactacccttatgagttctcacggaaagtacccacatttgcaaccccctggcctgactttgtaccccgtgctggtggagagaactacaaggagttcagtgagctgctccccaatcgacagggcctgaagaaagccgactgctccttctggtccaagtacatctcgtctctgaagacatctgcagatggagccaagggcgggcagtcagcagagagtgaagaggaggagttgacggctggatctgggctaagagaagatctcctaagcctccaggaaccaggctctaagacctacagcaagtga

SEQ ID NO: 150 - protein, 2768 aa, Homo sapiens
MALVLEIFTLLASICWVSANIFEYQVDAQPLRPCELQRETAFLKQADYVPQCAEDGSFQTVQCQNDGRSCWCVGANGSEVLGSRQPGRPVACLSFCQLQKQQILLSGYINSTDTSYLPQCQDSGDYAPVQCDVQQVQCWCVDAEGMEVYGTRQLGRPKRCPRSCEIRNRRLLHGVGDKSPPQCSAEGEFMPVQCKFVNTTDMMIFDLVHSYNRFPDAFVTFSSFQRRFPEVSGYCHCADSQGRELAETGLELLLDEIYDTIFAGLDLPSTFTETTLYRILQRRFLAVQSVISGRFRCPTKCEVERFTATSFGHPYVPSCRRNGDYQAVQCQTEGPCWCVDAQGKEMHGTRQQGEPPSCAEGQSCASERQQALSRLYFGTSGYFSQHDLFSSPEKRWASPRVARFATSCPPTIKELFVDSGLLRPMVEGQSQQFSVSENLLKEAIRAIFPSRGLARLALQFTTNPKRLQQNLFGGKFLVNVGQFNLSGALGTRGTFNFSQFFQQLGLASFLNGGRQEDLAKPLSVGLDSNSSTGTPEAAKKDGTMNKPTVGSFGFEINLQENQNALKFLASLLELPEFLLFLQHAISVPEDVARDLGDVMETVLSSQTCEQTPERLFVPSCTTEGSYEDVQCFSGECWCVNSWGKELPGSRVRGGQPRCPTDCEKQRARMQSLMGSQPAGSTLFVPACTSEGHFLPVQCFNSECYCVDAEGQAIPGTRSAIGKPKKCPTPCQLQSEQAFLRTVQALLSNSSMLPTLSDTYIPQCSTDGQWRQVQCNGPPEQVFELYQRWEAQNKGQDLTPAKLLVKIMSYREAASGNFSLFIQSLYEAGQQDVFPVLSQYPSLQDVPLAALEGKRPQPRENILLEPYLFWQILNGQLSQYPGSYSDFSTPLAHFDLRNCWCVDEAGQELEGMRSEPSKLPTCPGSCEEAKLRVLQFIRETEEIVSASNSSRFPLGESFLVAKGIRLRNEDLGLPPLFPPREAFAEQFLRGSDYAIRLAAQSTLSFYQRRRFSPDDSAGASALLRSGPYMPQCDAFGSWEPVQCHAGTGHCWCVDEKGGFIPGSLTARSLQIPQCPTTCEKSRTSGLLSSWKQARSQENPSPKDLFVPACLETGEYARLQASGAGTWCVDPASGEELRPGSSSSAQCPSLCNVLKSGVLSRRVSPGYVPACRAEDGGFSPVQCDQAQGSCWCVMDSGEEVPGTRVTGGQPACESPRCPLPFNASEVVGGTILCETISGPTGSAMQQCQLLCRQGSWSVFPPGPLICSLESGRWESQLPQPRACQRPQLWQTIQTQGHFQLQLPPGKMCSADYADLLQTFQVFILDELTARGFCQIQVKTFGTLVSIPVCNNSSVQVGCLTRERLGVNVTWKSRLEDIPVASLPDLHDIERALVGKDLLGRFTDLIQSGSFQLHLDSKTFPAETIRFLQGDHFGTSPRTWFGCSEGFYQVLTSEASQDGLGCVKCPEGSYSQDEECIPCPVGFYQEQAGSLACVPCPVGRTTISAGAFSQTHCVTDCQRNEAGLQCDQNGQYRASQKDRGSGKAFCVDGEGRRLPWWETEAPLEDSQCLMMQKFEKVPESKVIFDANAPVAVRSKVPDSEFPVMQCLTDCTEDEACSFFTVSTTEPEISCDFYAWTSDNVACMTSDQKRDALGNSKATSFGSLRCQVKVRSHGQDSPAVYLKKGQGSTTTLQKRFEPTGFQNMLSGLYNPIVFSASGANLTDAHLFCLLACDRDLCCDGFVLTQVQGGAIICGLLSSPSVLLCNVKDWMDPSEAWANATCPGVTYDQESHQVILRLGDQEFIKSLTPLEGTQDTFTNFQQVYLWKDSDMGSRPESMGCRKDTVPRPASPTEAGLTTELFSPVDLNQVIVNGNQSLSSQKHWLFKHLFSAQQANLWCLSRCVQEHSFCQLAEITESASLYFTCTLYPEAQVCDDIMESNAQGCRLILPQMPKALFRKKVILEDKVKNFYTRLPFQKLMGISIRNKVPMSEKSISNGFFECERRCDADPCCTGFGFLNVSQLKGGEVTCLTLNSLGIQMCSEENGGAWRILDCGSPDIEVHTYPFGWYQKPIAQNNAPSFCPLVVLPSLTEKVSLDSWQSLALSSVVVDPSIRHFDVAHVSTAATSNFSAVRDLCLSECSQHEACLITTLQTQPGAVRCMFYADTQSCTHSLQGQNCRLLLREEATHIYRKPGISLLSYEASVPSVPISTHGRLLGRSQAIQVGTSWKQVDQFLGVPYAAPPLAERRFQAPEPLNWTGSWDASKPRASCWQPGTRTSTSPGVSEDCLYLNVFIPQNVAPNASVLVFFHNTMDREESEGWPAIDGSFLAAVGNLIVVTASYRVGVFGFLSSGSGEVSGNWGLLDQVAALTWVQTHIRGFGGDPRRVSLAADRGGADVASIHLLTARATNSQLFRRAVLMGGSALSPAAVISHERAQQQAIALAKEVSCPMSSSQEVVSCLRQKPANVLNDAQTKLLAVSGPFHYWGPVIDGHFLREPPARALKRSLWVEVDLLIGSSQDDGLINRAKAVKQFEESRGRTSSKTAFYQALQNSLGGEDSDARVEAAATWYYSLEHSTDDYASFSRALENATRDYFIICPIIDMASAWAKRARGNVFMYHAPENYGHGSLELLADVQFALGLPFYPAYEGQFSLEEKSLSLKIMQYFSHFIRSGNPNYPYEFSRKVPTFATPWPDFVPRAGGENYKEFSELLPNRQGLKKADCSFWSKYISSLKTSADGAKGGQSAESEEEELTAGSGLREDLLSLQEPGSKTYSK

SEQ ID NO: 151 - DNA, 8136 bp, Homo sapiens
atggccctggtcctggagatcttcaccctgctggcctccatctgctgggtgtcggccaatatcttcgagtaccaggtggatgcccagccccttcgtccctgtgagctgcagagggaaacggcctttctgaagcaagcagactacgtgccccagtgtgcagaggatggcagcttccagactgtccagtgccagaacgacggccgctcctgctggtgtgtgggtgccaacggcagtgaagtgctgggcagcaggcagccaggacggcctgtggcttgtctgtcattttgtcagctacagaaacagcagatcttactgagtggctacattaacagcacagacacctcctacctccctcagtgtcaggattcaggggactacgcgcctgttcagtgtgatgtgcagcaggtccagtgctggtgtgtggacgcagaggggatggaggtgtatgggacccgccagctggggaggccaaagcgatgtccaaggagctgtgaaataagaaatcgtcgtcttctccacggggtgggagataagtcaccaccccagtgttctgcggagggagagtttatgcctgtccagtgcaaatttgtcaacaccacagacatgatgatttttgatctggtccacagctacaacaggtttccagatgcatttgtgaccttcagttccttccagaggaggttccctgaggtatctgggtattgccactgtgctgacagccaagggcgggaactggctgagacaggtttggagttgttactggatgaaatttatgacaccatttttgctggcctggaccttccttccaccttcactgaaaccaccctgtaccggatactgcagagacggttcctcgcagttcaatcagtcatctctggcagattccgatgccccacaaaatgtgaagtggagcggtttacagcaaccagctttggtcacccctatgttccaagctgccgccgaaatggcgactatcaggcggtgcagtgccagacggaagggccctgctggtgtgtggacgcccaggggaaggaaatgcatggaacccggcagcaaggggagccgccatcttgtgctgaaggccaatcttgtgcctccgaaaggcagcaggccttgtccagactctactttgggacctcaggctacttcagccagcacgacctgttctcttccccagagaaaagatgggcctctccaagagtagccagatttgccacatcctgcccacccacgatcaaggagctctttgtggactctgggcttctccgcccaatggtggagggacagagccaacagttttctgtctcagaaaatcttctcaaagaagccatccgagcaatttttccctcccgagggctggctcgtcttgcccttcagtttaccaccaacccaaagagactccagcaaaacctttttggagggaaatttttggtgaatgttggccagtttaacttgtctggagcccttggcacaagaggcacatttaacttcagtcaatttttccagcaacttggtcttgcaagcttcttgaatggagggagacaagaagatttggccaagccactctctgtgggattagattcaaattcttccacaggaacccctgaagctgctaagaaggatggtactatgaataagccaactgtgggcagctttggctttgaaattaacctacaagagaaccaaaatgccctcaaattccttgcttctctcctggagcttccagaattccttctcttcttgcaacatgctatctctgtgccagaagatgtggcaagagatttaggtgatgtgatggaaacggtactcagctcccagacctgtgagcagacacctgaaaggctatttgtcccatcatgcacgacagaaggaagctatgaggatgtccaatgcttttccggagagtgctggtgtgtgaattcctggggcaaagagcttccaggctcaagagtcagaggtggacagccaaggtgccccacagactgtgaaaagcaaagggctcgcatgcaaagcctcatgggcagccagcctgctggctccaccttgtttgtccctgcttgtactagtgagggacatttcctgcctgtccagtgcttcaactcagagtgctactgtgttgatgctgagggtcaggccattcctggaactcgaagtgcaatagggaagcccaagaaatgccccacgccctgtcaattacagtctgagcaagctttcctcaggacggtgcaggccctgctctctaactccagcatgctacccaccctttccgacacctacatcccacagtgcagcaccgatgggcagtggagacaagtgcaatgcaatgggcctcctgagcaggtcttcgagttgtaccaacgatgggaggctcagaacaagggccaggatctgacgcctgccaagctgctagtgaagatcatgagctacagagaagcagcttccggaaacttcagtctctttattcaaagtctgtatgaggctggccagcaagatgtcttcccggtgctgtcacaatacccttctctgcaagatgtcccactagcagcactggaagggaaacggccccagcccagggagaatatcctcctggagccctacctcttctggcagatcttaaatggccaactcagccaatacccggggtcctactcagacttcagcactcctttggcacattttgatcttcggaactgctggtgtgtggatgaggctggccaagaactggaaggaatgcggtctgagccaagcaagctcccaacatgtcctggctcctgtgaggaagcaaagctccgtgtactgcagttcattagggaaacggaagagattgtttcagcttccaacagttctcggttccctctgggggagagtttcctggtggccaagggaatccggctgaggaatgaggacctcggccttcctccgctcttcccgccccgggaggctttcgcggagcagtttctgcgtgggagtgattacgccattcgcctggcggctcagtctaccttaagcttctatcagagacgccgcttttccccggacgactcggctggagcatccgcccttctgcggtcgggcccctacatgccacagtgtgatgcgtttggaagttgggagcctgtgcagtgccacgctgggactgggcactgctggtgtgtagatgagaaaggagggttcatccctggctcactgactgcccgctctctgcagattccacagtgcccgacaacctgcgagaaatctcgaaccagtgggctgctttccagttggaaacaggctagatcccaagaaaacccatctccaaaagacctgttcgtcccagcctgcctagaaacaggagagtatgccaggctgcaggcatcgggggctggcacctggtgtgtggaccctgcatcaggagaagagttgcggcctggctcgagcagcagtgcccagtgcccaagcctctgcaatgtgctcaagagtggagtcctctccaggagagtcagcccaggctatgtcccagcctgcagggcagaggatgggggcttttccccagtgcaatgtgaccaggcccagggcagctgctggtgtgtcatggacagcggagaagaggtgcctgggacgcgcgtgaccgggggccagcccgcctgtgagagcccgcggtgtccgctgccattcaacgcgtcggaggtggttggtggaacaatcctgtgtgagacaatctcgggccccacaggctctgccatgcagcagtgccaattgctgtgccgccagggctcctggagcgtgtttccaccagggccattgatatgtagcctggagagcggacgctgggagtcacagctgcctcagccccgggcctgccaacggccccagctgtggcagaccatccagacccaagggcactttcagctccagctcccgccgggcaagatgtgcagtgctgactacgcggatttgctgcagactttccaggttttcatattggatgagctgacagcccgcggcttctgccagatccaggtgaagacttttggcaccctggtttccattcctgtctgcaacaactcctctgtgcaggtgggttgtctgaccagggagcgtttaggagtgaatgttacatggaaatcacggcttgaggacatcccagtggcttctcttcctgacttacatgacattgagagagccttggtgggcaaggatctccttgggcgcttcacagatctgatccagagtggctcattccagcttcatctggactccaagacgttcccagcggaaaccatccgcttcctccaaggggaccactttggcacctctcccaggacatggtttgggtgctcggaaggattctaccaagtcttgacaagtgaggccagtcaggacggactgggatgcgttaagtgtcctgaaggaagctattcccaagatgaggaatgcattccttgtcctgttggattctaccaagaacaggcagggagcttggcctgtgtcccatgtcctgtgggcagaacgaccatttctgctggagctttcagccagactcacttgatgcagaagtttgagaaggttccagaatcaaaggtgatcttcgacgccaatgctcctgtggctgtcagatccaaagttcctgattctgagttccccgtgatgcagtgcttgacagattgcacagaggacgaggcctgcagcttcttcaccgtgtccacgacggagccagagatttcctgtgatttctatgcttggacaagtgacaatgttgcctgcatgacttctgaccagaaacgagatgcactggggaactcaaaggccaccagctttggaagtcttcgctgccaggtgaaagtgaggagccatggtcaagattctccagctgtgtatttgaaaaagggccaaggatccaccacaacacttcagaaacgctttgaacccactggtttccaaaacatgctttctggattgtacaaccccattgtgttctcagcctcaggagccaatctaaccgatgctcacctcttctgtcttcttgcatgcgaccgtgatctgtgttgcgatggcttcgtcctcacacaggttcaaggaggtgccatcatctgtgggttgctgagctcacccagtgtcctgctttgtaatgtcaaagactggatggatccctctgaagcctgggctaatgctacatgtcctggtgtgacatatgaccaggagagccaccaggtgatattgcgtcttggagaccaggagttcatcaagagtctgacacccttagaaggaactcaagacacctttaccaattttcagcaggtttatctctggaaagattctgacatggggtctcggcctgagtctatgggatgtagaaaagacacagtgccaaggccagcatctccaacagaagcaggtttgacaacagaacttttctcccctgtggacctcaaccaggtcattgtcaatggaaatcaatcactatccagccagaagcactggcttttcaagcacctgttttcagcccagcaggcaaacctatggtgcctttctcgttgtgtgcaggagcactctttctgtcagctcgcagagataacagagagtgcatccttgtacttcacctgcaccctctacccagaggcacaggtgtgtgatgacatcatggagtccaatgcccagggctgcagactgatcctgcctcagatgccaaaggccctgttccggaagaaagttatactggaagataaagtgaagaacttttacactcgcctgccgttccaaaaactgatggggatatccattagaaataaagtgcccatgtctgaaaaatctatttctaatgggttctttgaatgtgaacgacggtgcgatgcggacccatgctgcactggctttggatttctaaatgtttcccagttaaaaggaggagaggtgacatgtctcactctgaacagcttgggaattcagatgtgcagtgaggagaatggaggagcctggcgcattttggactgtggctctcctgacattgaagtccacacctatcccttcggatggtaccagaagcccattgctcaaaataatgctcccagtttttgccctttggttgttctgccttccctcacagagaaagtgtctctggactcgtggcagtccctggccctctcttcagtggttgttgatccatccattaggcactttgatgttgcccatgtcagcactgctgccaccagcaatttctctgctgtccgagacctctgtttgtcggaatgttcccaacatgaggcctgtctcatcaccactctgcaaacccaacctggggctgtgagatgtatgttctatgctgatactcaaagctgcacacatagtctgcagggtcagaactgccgacttctgcttcgtgaagaggccacccacatctaccggaagccaggaatctctctgctcagctatgaggcatctgtaccttctgtgcccatttccacccatggccggctgctgggcaggtcccaggccatccaggtgggtacctcatggaagcaagtggaccagttccttggagttccatatgctgccccgcccctggcagagaggcgcttccaggcaccagagcccttgaactggacaggctcctgggatgccagcaagccaagggccagctgctggcagccaggcaccagaacatccacgtctcctggagtcagtgaagattgtttgtatctcaatgtgttcatccctcagaatgtggcccctaacgcgtctgtgctggtgttcttccacaacaccatggacagggaggagagtgaaggatggccggctatcgacggctccttcttggctgctgttggcaacctcatcgtggtcactgccagctaccgagtgggtgtcttcggcttcctgagttctgggtccggagaggtgagtggcaactgggggctgctggaccaggtggcggctctgacctgggtgcagacccacatccgaggatttggcggggaccctcggcgcgtgtccctggcagcagaccgtggcggggctgatgtggccagcatccaccttctcacggccagggccaccaactcccaacttttccggagagctgtgctgatgggaggctccgcactctccccggccgccgtcatcagccatgagagggctcagcagcaggcaattgctttggcaaaggaggtcagttgccccatgtcatccagccaagaagtggtgtcctgcctccgccagaagcctgccaatgtcctcaatgatgcccagaccaagctcctggccgtgagtggccctttccactactggggtcctgtgatcgatggccacttcctccgtgagcctccagccagagcactgaagaggtctttatgggtagaggtcgatctgctcattgggagttctcaggacgacgggctcatcaacagagcaaaggctgtgaagcaatttgaggaaagtcgaggccggaccagtagcaaaacagccttttaccaggcactgcagaattctctgggtggcgaggactcagatgcccgcgtcgaggctgctgctacatggtattactctctggagcactccacggatgactatgcctccttctcccgggctctggagaatgccacccgggactactttatcatctgccctataatcgacatggccagtgcctgggcaaagagggcccgaggaaacgtcttcatgtaccatgctcctgaaaactacggccatggcagcctggagctgctggcggatgttcagtttgccttggggcttcccttctacccagcctacgaggggcagttttctctggaggagaagagcctgtcgctgaaaatcatgcagtacttttcccacttcatcagatcaggaaatcccaactacccttatgagttctcacggaaagtacccacatttgcaaccccctggcctgactttgtaccccgtgctggtggagagaactacaaggagttcagtgagctgctccccaatcgacagggcctgaagaaagccgactgctccttctggtccaagtacatctcgtctctgaagacatctgcagatggagccaagggcgggcagtcagcagagagtgaagaggaggagttgacggctggatctgggctaagagaagatctcctaagcctccaggaaccaggctctaagacctacagcaagtga

SEQ ID NO: 152 - protein, 2711 aa, Homo sapiens
MALVLEIFTLLASICWVSANIFEYQVDAQPLRPCELQRETAFLKQADYVPQCAEDGSFQTVQCQNDGRSCWCVGANGSEVLGSRQPGRPVACLSFCQLQKQQILLSGYINSTDTSYLPQCQDSGDYAPVQCDVQQVQCWCVDAEGMEVYGTRQLGRPKRCPRSCEIRNRRLLHGVGDKSPPQCSAEGEFMPVQCKFVNTTDMMIFDLVHSYNRFPDAFVTFSSFQRRFPEVSGYCHCADSQGRELAETGLELLLDEIYDTIFAGLDLPSTFTETTLYRILQRRFLAVQSVISGRFRCPTKCEVERFTATSFGHPYVPSCRRNGDYQAVQCQTEGPCWCVDAQGKEMHGTRQQGEPPSCAEGQSCASERQQALSRLYFGTSGYFSQHDLFSSPEKRWASPRVARFATSCPPTIKELFVDSGLLRPMVEGQSQQFSVSENLLKEAIRAIFPSRGLARLALQFTTNPKRLQQNLFGGKFLVNVGQFNLSGALGTRGTFNFSQFFQQLGLASFLNGGRQEDLAKPLSVGLDSNSSTGTPEAAKKDGTMNKPTVGSFGFEINLQENQNALKFLASLLELPEFLLFLQHAISVPEDVARDLGDVMETVLSSQTCEQTPERLFVPSCTTEGSYEDVQCFSGECWCVNSWGKELPGSRVRGGQPRCPTDCEKQRARMQSLMGSQPAGSTLFVPACTSEGHFLPVQCFNSECYCVDAEGQAIPGTRSAIGKPKKCPTPCQLQSEQAFLRTVQALLSNSSMLPTLSDTYIPQCSTDGQWRQVQCNGPPEQVFELYQRWEAQNKGQDLTPAKLLVKIMSYREAASGNFSLFIQSLYEAGQQDVFPVLSQYPSLQDVPLAALEGKRPQPRENILLEPYLFWQILNGQLSQYPGSYSDFSTPLAHFDLRNCWCVDEAGQELEGMRSEPSKLPTCPGSCEEAKLRVLQFIRETEEIVSASNSSRFPLGESFLVAKGIRLRNEDLGLPPLFPPREAFAEQFLRGSDYAIRLAAQSTLSFYQRRRFSPDDSAGASALLRSGPYMPQCDAFGSWEPVQCHAGTGHCWCVDEKGGFIPGSLTARSLQIPQCPTTCEKSRTSGLLSSWKQARSQENPSPKDLFVPACLETGEYARLQASGAGTWCVDPASGEELRPGSSSSAQCPSLCNVLKSGVLSRRVSPGYVPACRAEDGGFSPVQCDQAQGSCWCVMDSGEEVPGTRVTGGQPACESPRCPLPFNASEVVGGTILCETISGPTGSAMQQCQLLCRQGSWSVFPPGPLICSLESGRWESQLPQPRACQRPQLWQTIQTQGHFQLQLPPGKMCSADYADLLQTFQVFILDELTARGFCQIQVKTFGTLVSIPVCNNSSVQVGCLTRERLGVNVTWKSRLEDIPVASLPDLHDIERALVGKDLLGRFTDLIQSGSFQLHLDSKTFPAETIRFLQGDHFGTSPRTWFGCSEGFYQVLTSEASQDGLGCVKCPEGSYSQDEECIPCPVGFYQEQAGSLACVPCPVGRTTISAGAFSQTHLMQKFEKVPESKVIFDANAPVAVRSKVPDSEFPVMQCLTDCTEDEACSFFTVSTTEPEISCDFYAWTSDNVACMTSDQKRDALGNSKATSFGSLRCQVKVRSHGQDSPAVYLKKGQGSTTTLQKRFEPTGFQNMLSGLYNPIVFSASGANLTDAHLFCLLACDRDLCCDGFVLTQVQGGAIICGLLSSPSVLLCNVKDWMDPSEAWANATCPGVTYDQESHQVILRLGDQEFIKSLTPLEGTQDTFTNFQQVYLWKDSDMGSRPESMGCRKDTVPRPASPTEAGLTTELFSPVDLNQVIVNGNQSLSSQKHWLFKHLFSAQQANLWCLSRCVQEHSFCQLAEITESASLYFTCTLYPEAQVCDDIMESNAQGCRLILPQMPKALFRKKVILEDKVKNFYTRLPFQKLMGISIRNKVPMSEKSISNGFFECERRCDADPCCTGFGFLNVSQLKGGEVTCLTLNSLGIQMCSEENGGAWRILDCGSPDIEVHTYPFGWYQKPIAQNNAPSFCPLVVLPSLTEKVSLDSWQSLALSSVVVDPSIRHFDVAHVSTAATSNFSAVRDLCLSECSQHEACLITTLQTQPGAVRCMFYADTQSCTHSLQGQNCRLLLREEATHIYRKPGISLLSYEASVPSVPISTHGRLLGRSQAIQVGTSWKQVDQFLGVPYAAPPLAERRFQAPEPLNWTGSWDASKPRASCWQPGTRTSTSPGVSEDCLYLNVFIPQNVAPNASVLVFFHNTMDREESEGWPAIDGSFLAAVGNLIVVTASYRVGVFGFLSSGSGEVSGNWGLLDQVAALTWVQTHIRGFGGDPRRVSLAADRGGADVASIHLLTARATNSQLFRRAVLMGGSALSPAAVISHERAQQQAIALAKEVSCPMSSSQEVVSCLRQKPANVLNDAQTKLLAVSGPFHYWGPVIDGHFLREPPARALKRSLWVEVDLLIGSSQDDGLINRAKAVKQFEESRGRTSSKTAFYQALQNSLGGEDSDARVEAAATWYYSLEHSTDDYASFSRALENATRDYFIICPIIDMASAWAKRARGNVFMYHAPENYGHGSLELLADVQFALGLPFYPAYEGQFSLEEKSLSLKIMQYFSHFIRSGNPNYPYEFSRKVPTFATPWPDFVPRAGGENYKEFSELLPNRQGLKKADCSFWSKYISSLKTSADGAKGGQSAESEEEELTAGSGLREDLLSLQEPGSKTYSK

SEQ ID NO: 153 - DNA, 1296 bp, Homo sapiens
atgaatgcgcttctcctgtctgcctggttcggccacttacgaatcctccagatcttggtaaactcaggggccaagatccactgtgagagcaaggatggcctgaccttactgcactgcgcagcccaaaaaggccatgtgcctgtgctggcgttcataatggaggacctggaggatgtggccctggaccacgtagacaagctggggaggacggcgtttcacagggcagctgagcacgggcagctggatgctctggacttcctcgtgggctctggctgtgaccacaatgtcaaagacaaggaggggaacactgcccttcatctggctgctggtcggggccatatggctgtgctgcagcgacttgtggacatcgggctggacctggaggagcagaatgcggaaggtctgactgccctgcattcggctgctggaggatcccaccctgactgtgtgcagctcctcctcagggctgggagcaccgtgaatgccctcacccagaaaaacctaagctgccttcactatgcagccctcagtggctcggaggatgtgtctcgggtcctcatccacgcaggaggctgcgccaacgtggttgatcatcagggtgcctctcctctgcacctcgctgtgaggcacaacttccctgccttggtccggctcctcatcaactccgacagtgacgtgaatgccgtggacaataggcagcagacgccccttcacctggctgcagagcacgcctggcaggacatagcagatatgctcctcattgctggggttgacttaaacctgagagataagcagggaaaaaccgccctggcagtggctgtccgcagcaaccatgtcagcctggtggacatgatcataaaagctgatcgtttctacagatgggagaaggaccaccccagtgatccctctgggaagagcttgtcctttaagcaggaccatcggcaggaaacacagcagctccgttctgtgctgtggcggctggcctccaggtatctgcagccccgtgagtggaagaagctggcatattcctgggagttcacggaggcacatgtcgacgccatcgagcaacagtggacaggcaccaggagctatcaggagcacggccaccgaatgctgctcatttggctgcatggcgtggccacggctggtgagaaccccagcaaagcgctgttcgagggcctcgtggccattggcaggagggacctggctggctggagtacaatggcgagatctcagctcacggcaacctccgcctcccgggttcaaatgattctcgtgcctcagcctcccgagtag

SEQ ID NO: 154 - protein, 318 aa, Homo sapiens
MAVLQRLVDIGLDLEEQNAEGLTALHSAAGGSHPDCVQLLLRAGSTVNALTQKNLSCLHYAALSGSEDVSRVLIHAGGCANVVDHQGASPLHLAVRHNFPALVRLLINSDSDVNAVDNRQQTPLHLAAEHAWQDIADMLLIAGVDLNLRDKQGKTALAVAVRSNHVSLVDMIIKADRFYRWEKDHPSDPSGKSLSFKQDHRQETQQLRSVLWRLASRYLQPREWKKLAYSWEFTEAHVDAIEQQWTGTRSYQEHGHRMLLIWLHGVATAGENPSKALFEGLVAIGRRDLAGWSTMARSQLTATSASRVQMILVPQPPE

SEQ ID NO: 155 - DNA, 3014 bp, Homo sapiens
agcgcgcgcaggggctgcggagcggcaggatgcaggaggagctggcgtgggagaccgacggcctgcttcctctggagaggcagctccacgaggccgcccgccagaacaatgtcggcaggatgcaggagctgattgggaggagggttaacaccagggccagaaaccacgtgggcagggtggccctgcactgggctgcaggtgcagggcacgagcaggctgtgcgtctgcttctggagcacgaggctgctgtggacgaggaggatgcggtaggggccctcacagaggcacgtctgtgttttgggatgaatgcgcttctcctgtctgcctggttcggccacttacgaatcctccagatcttggtaaactcaggggccaagatccactgtgagagcaaggatggcctgaccttactgcactgcgcagcccaaaaaggccatgtgcctgtgctggcgttcataatggaggacctggaggatgtggccctggaccacgtagacaagctggggaggacggcgtttcacagggcagctgagcacgggcagctggatgctctggacttcctcgtgggctctggctgtgaccacaatgtcaaagacaaggaggggaacactgcccttcatctggctgctggtcggggccatatggctgtgctgcagcgacttgtggacatcgggctggacctggaggagcagaatgcggaaggtctgactgccctgcattcggctgctggaggatcccaccctgactgtgtgcagctcctcctcagggctgggagcaccgtgaatgccctcacccagaaaaacctaagctgccttcactatgcagccctcagtggctcggaggatgtgtctcgggtcctcatccacgcaggaggctgcgccaacgtggttgatcatcagggtgcctctcctctgcacctcgctgtgaggcacaacttccctgccttggtccggctcctcatcaactccgacagtgacgtgaatgccgtggacaataggcagcagacgccccttcacctggctgcagagcacgcctggcaggacatagcagatatgctcctcattgctggggttgacttaaacctgagagataaggaccaccccagtgatccctctgggaagagcttgtcctttaagcaggaccatcggcaggaaacacagcagctccgttctgtgctgtggcggctggcctccaggtatctgcagccccgtgagtggaagaagctggcatattcctgggagttcacggaggcacatgtcgacgccatcgagcaacagtggacaggcaccaggagctatcaggagcacggccaccgaatgctgctcatttggctgcatggcgtggccacggctggtgagaaccccagcaaagcgctgttcgagggcctcgtggccattggcaggagggacctggctggctggagtacaatggcgagatctcagctcacggcaacctccgcctcccgggttcaaatgattctcgtgcctcagcctcccgagtagctgggattacaggtgcatgccatcacagctggctaatttttgtatttttagtagagatggggtttggccatgatggccaggctggaaaattgaaacataatttcacaattattcctttttccaccttaaataataagagtagaatactttctgtgtttttatcttatacacatgaataaatgctatggcttatcacagttacaatgtgttttctgaaagtaaagattattttaccttgaaattacaaaaattattttcagttttccaaaattctatcatctttaaacctaaataattcaatttcatggatgcacaaatgtttattgagagtctcatattcatgcttttcttcacagcactataaagttggacttggaaaatttggacagccatttgccattgtaatttttattcttttttctcctgattatttgacaaaacttgtatccacattgtagctgttcatgtgtctgcttctattgcatattgtaaaattattaactacttcccaaaatagtatttctctcagcagatatttctttggtactaccatgtattgtgtaacttttgggaaagtaaggtggcttccctgctctcagtgaagcattttattaaaagaataattataattaaaaaaacacgatacagatcagtgcatatagtatattactaatagtatgctgttaattgtgtaagaaagaaaggaaattagaaaacatatttgcataaataaaagctagacaaaggctaagaaactaatcaggtggtttccctggggtagtaggataatggggaacagtggggctgggaccgggtgggagaaagagttctcagtggttcctttctatacagttttaacttttgaaatgtgtgagagtgttacttactgaaaactgaaaggatatgacatgctggaacaggcaaaactacaaagacagtaaaaagatcagtgatttccaggagctgcaagggcagtgagaggaagggagggatgaggaggtggagtgcaggggatgttagggcagtgaaaggttctgtatgacactgtgatggtgggtacatgacattgggcattggtcaaaacccatagcatgtacagcacaaagcgtttgctctaatgtgagctatggactttagttaatagtaacgtgtcaatattggttcatcagttgtatcaaatgtaccacactgatgccagatgttaataatcggggaaactgtgtgtgctgaagagtacgtgggagctctctgtgctatctgctcaatttttctctaaacctaaaactgttctaaaatagaaagtctgtgaaaaaaaacaaaagtaaagttataaaaggaaaagaaaacagaggctttaaattaaatcatctattccttgggaaaggtattttgtaccatatgggactgaaatcatttctctggatgaattttataaaatgaattttgtaatttttttctgagaaaaaaaagttcttaaatacaataaaattgaaatgttgaaatatatctctc

SEQ ID NO: 156 - protein, 399 aa, Homo sapiens
MNALLLSAWFGHLRILQILVNSGAKIHCESKDGLTLLHCAAQKGHVPVLAFIMEDLEDVALDHVDKLGRTAFHRAAEHGQLDALDFLVGSGCDHNVKDKEGNTALHLAAGRGHMAVLQRLVDIGLDLEEQNAEGLTALHSAAGGSHPDCVQLLLRAGSTVNALTQKNLSCLHYAALSGSEDVSRVLIHAGGCANVVDHQGASPLHLAVRHNFPALVRLLINSDSDVNAVDNRQQTPLHLAAEHAWQDIADMLLIAGVDLNLRDKDHPSDPSGKSLSFKQDHRQETQQLRSVLWRLASRYLQPREWKKLAYSWEFTEAHVDAIEQQWTGTRSYQEHGHRMLLIWLHGVATAGENPSKALFEGLVAIGRRDLAGWSTMARSQLTATSASRVQMILVPQPPE

SEQ ID NO: 157 - DNA, 3113 bp, Homo sapiens
agcgcgcgcaggggctgcggagcggcaggatgcaggaggagctggcgtgggagaccgacggcctgcttcctctggagaggcagctccacgaggccgcccgccagaacaatgtcggcaggatgcaggagctgattgggaggagggttaacaccagggccagaaaccacgtgggcagggtggccctgcactgggctgcaggtgcagggcacgagcaggctgtgcgtctgcttctggagcacgaggctgctgtggacgaggaggatgcggtaggggccctcacagaggcacgtctgtgttttgggatgaatgcgcttctcctgtctgcctggttcggccacttacgaatcctccagatcttggtaaactcaggggccaagatccactgtgagagcaaggatggcctgaccttactgcactgcgcagcccaaaaaggccatgtgcctgtgctggcgttcataatggaggacctggaggatgtggccctggaccacgtagacaagctggggaggacggcgtttcacagggcagctgagcacgggcagctggatgctctggacttcctcgtgggctctggctgtgaccacaatgtcaaagacaaggaggggaacactgcccttcatctggctgctggtcggggccatatggctgtgctgcagcgacttgtggacatcgggctggacctggaggagcagaatgcggaaggtctgactgccctgcattcggctgctggaggatcccaccctgactgtgtgcagctcctcctcagggctgggagcaccgtgaatgccctcacccagaaaaacctaagctgccttcactatgcagccctcagtggctcggaggatgtgtctcgggtcctcatccacgcaggaggctgcgccaacgtggttgatcatcagggtgcctctcctctgcacctcgctgtgaggcacaacttccctgccttggtccggctcctcatcaactccgacagtgacgtgaatgccgtggacaataggcagcagacgccccttcacctggctgcagagcacgcctggcaggacatagcagatatgctcctcattgctggggttgacttaaacctgagagataagcagggaaaaaccgccctggcagtggctgtccgcagcaaccatgtcagcctggtggacatgatcataaaagctgatcgtttctacagatgggagaaggaccaccccagtgatccctctgggaagagcttgtcctttaagcaggaccatcggcaggaaacacagcagctccgttctgtgctgtggcggctggcctccaggtatctgcagccccgtgagtggaagaagctggcatattcctgggagttcacggaggcacatgtcgacgccatcgagcaacagtggacaggcaccaggagctatcaggagcacggccaccgaatgctgctcatttggctgcatggcgtggccacggctggtgagaaccccagcaaagcgctgttcgagggcctcgtggccattggcaggagggacctggctggctggagtacaatggcgagatctcagctcacggcaacctccgcctcccgggttcaaatgattctcgtgcctcagcctcccgagtagctgggattacaggtgcatgccatcacagctggctaatttttgtatttttagtagagatggggtttggccatgatggccaggctggaaaattgaaacataatttcacaattattcctttttccaccttaaataataagagtagaatactttctgtgtttttatcttatacacatgaataaatgctatggcttatcacagttacaatgtgttttctgaaagtaaagattattttaccttgaaattacaaaaattattttcagttttccaaaattctatcatctttaaacctaaataattcaatttcatggatgcacaaatgtttattgagagtctcatattcatgcttttcttcacagcactataaagttggacttggaaaatttggacagccatttgccattgtaatttttattcttttttctcctgattatttgacaaaacttgtatccacattgtagctgttcatgtgtctgcttctattgcatattgtaaaattattaactacttcccaaaatagtatttctctcagcagatatttctttggtactaccatgtattgtgtaacttttgggaaagtaaggtggcttccctgctctcagtgaagcattttattaaaagaataattataattaaaaaaacacgatacagatcagtgcatatagtatattactaatagtatgctgttaattgtgtaagaaagaaaggaaattagaaaacatatttgcataaataaaagctagacaaaggctaagaaactaatcaggtggtttccctggggtagtaggataatggggaacagtggggctgggaccgggtgggagaaagagttctcagtggttcctttctatacagttttaacttttgaaatgtgtgagagtgttacttactgaaaactgaaaggatatgacatgctggaacaggcaaaactacaaagacagtaaaaagatcagtgatttccaggagctgcaagggcagtgagaggaagggagggatgaggaggtggagtgcaggggatgttagggcagtgaaaggttctgtatgacactgtgatggtgggtacatgacattgggcattggtcaaaacccatagcatgtacagcacaaagcgtttgctctaatgtgagctatggactttagttaatagtaacgtgtcaatattggttcatcagttgtatcaaatgtaccacactgatgccagatgttaataatcggggaaactgtgtgtgctgaagagtacgtgggagctctctgtgctatctgctcaatttttctctaaacctaaaactgttctaaaatagaaagtctgtgaaaaaaaacaaaagtaaagttataaaaggaaaagaaaacagaggctttaaattaaatcatctattccttgggaaaggtattttgtaccatatgggactgaaatcatttctctggatgaattttataaaatgaattttgtaatttttttctgagaaaaaaaagttcttaaatacaataaaattgaaatgttgaaatatatctctcaaa

SEQ ID NO: 158 - protein, 522 aa, Homo sapiens
MQEELAWETDGLLPLERQLHEAARQNNVGRMQELIGRRVNTRARNHVGRVALHWAAGAGHEQAVRLLLEHEAAVDEEDAVGALTEARLCFGMNALLLSAWFGHLRILQILVNSGAKIHCESKDGLTLLHCAAQKGHVPVLAFIMEDLEDVALDHVDKLGRTAFHRAAEHGQLDALDFLVGSGCDHNVKDKEGNTALHLAAGRGHMAVLQRLVDIGLDLEEQNAEGLTALHSAAGGSHPDCVQLLLRAGSTVNALTQKNLSCLHYAALSGSEDVSRVLIHAGGCANVVDHQGASPLHLAVRHNFPALVRLLINSDSDVNAVDNRQQTPLHLAAEHAWQDIADMLLIAGVDLNLRDKQGKTALAVAVRSNHVSLVDMIIKADRFYRWEKDHPSDPSGKSLSFKQDHRQETQQLRSVLWRLASRYLQPREWKKLAYSWEFTEAHVDAIEQQWTGTRSYQEHGHRMLLIWLHGVATAGENPSKALFEGLVAIGRRDLAGWSTMARSQLTATSASRVQMILVPQPPE

SEQ ID NO: 159 - DNA, 1574 bp, Homo sapiens
agcgcgcgcaggggctgcggagcggcaggatgcaggaggagctggcgtgggagaccgacggcctgcttcctctggagaggcagctccacgaggccgcccgccagaacaatgtcggcaggatgcaggagctgattgggaggagggttaacaccagggccagaaaccacgtgggcagggtggccctgcactgggctgcaggtgcagggcacgagcaggctgtgcgtctgcttctggagcacgaggctgctgtggacgaggaggatgcggtaggggccctcacagaggcacgtctgtgttttgggatgaatgcgcttctcctgtctgcctggttcggccacttacgaatcctccagatcttggtaaactcaggggccaagatccactgtgagagcaaggatggcctgaccttactgcactgcgcagcccaaaaaggccatgtgcctgtgctggcgttcataatggaggacctggaggatgtggccctggaccacgtagacaagctggggaggacggcgtttcacagggcagctgagcacgggcagctggatgctctggacttcctcgtgggctctggctgtgaccacaatgtcaaagacaaggaggggaacactgcccttcatctggctgctggtcggggccatatggctgtgctgcagcgacttgtggacatcgggctggacctggaggagcagaatgcggaaggtctgactgccctgcattcggctgctggaggatcccaccctgactgtgtgcagctcctcctcagggctgggagcaccgtgaatgccctcacccagaaaaacctaagctgccttcactatgcagccctcagtggctcggaggatgtgtctcgggtcctcatccacgcaggaggctgcgccaacgtggttgatcatcagggtgcctctcctctgcacctcgctgtgaggcacaacttccctgccttggtccggctcctcatcaactccgacagtgacgtgaatgccgtggacaataggcagcagacgccccttcacctggctgcagagcacgcctggcaggacatagcagatatgctcctcattgctggggttgacttaaacctgagagataagcagggaaaaaccgccctggcagtggctgtccgcagcaaccatgtcagcctggtggacatgatcataaaagctgatcgtttctacagatgggagaaggaccaccccagtgatccctctgggaagagcttgtcctttaagcaggaccatcggcaggaaacacagcagctccgttctgtgctgtggcggctggcctccaggtatctgcagccccgtgagtggaagaagctggcatattcctgggagttcacggaggcacatgtcgacgccatcgagcaacagtggacaggcaccaggagctatcaggagcacggccaccgaatgctgctcatttggctgcatggcgtggccacggctggtgagaaccccagcaaagcgctgttcgagggcctcgtggccattggcaggagggacctggctgaaaatatcaggaagaaagcaaacgcagccccgagtgcccccaggaggtgcacagccatgtaa

SEQ ID NO: 160 - protein, 423 aa, Homo sapiens
MNALLLSAWFGHLRILQILVNSGAKIHCESKDGLTLLHCAAQKGHVPVLAFIMEDLEDVALDHVDKLGRTAFHRAAEHGQLDALDFLVGSGCDHNVKDKEGNTALHLAAGRGHMAVLQRLVDIGLDLEEQNAEGLTALHSAAGGSHPDCVQLLLRAGSTVNALTQKNLSCLHYAALSGSEDVSRVLIHAGGCANVVDHQGASPLHLAVRHNFPALVRLLINSDSDVNAVDNRQQTPLHLAAEHAWQDIADMLLIAGVDLNLRDKQGKTALAVAVRSNHVSLVDMIIKADRFYRWEKDHPSDPSGKSLSFKQDHRQETQQLRSVLWRLASRYLQPREWKKLAYSWEFTEAHVDAIEQQWTGTRSYQEHGHRMLLIWLHGVATAGENPSKALFEGLVAIGRRDLAENIRKKANAAPSAPRRCTAM

SEQ ID NO: 161 - DNA, 1250 bp, Homo sapiens
atgaatgcgcttctcctgtctgcctggttcggccacttacgaatcctccagatcttggtaaactcaggggccaagatccactgtgagagcaaggatggcctgaccttactgcactgcgcagcccaaaaaggccatgtgcctgtgctggcgttcataatggaggacctggaggatgtggccctggaccacgtagacaagctggggaggacggcgtttcacagggcagctgagcacgggcagctggatgctctggacttcctcgtgggctctggctgtgaccacaatgtcaaagacaaggaggggaacactgcccttcatctggctgctggtcggggccatatggctgtgctgcagcgacttgtggacatcgggctggacctggaggagcagaatgcggaaggtctgactgccctgcattcggctgctggaggatcccaccctgactgtgtgcagctcctcctcagggctgggagcaccgtgaatgccctcacccagaaaaacctaagctgccttcactatgcagccctcagtggctcggaggatgtgtctcgggtcctcatccacgcaggaggctgcgccaacgtggttgatcatcagggtgcctctcctctgcacctcgctgtgaggcacaacttccctgccttggtccggctcctcatcaactccgacagtgacgtgaatgccgtggacaataggcagcagacgccccttcacctggctgcagagcacgcctggcaggacatagcagatatgctcctcattgctggggttgacttaaacctgagagataaggaccaccccagtgatccctctgggaagagcttgtcctttaagcaggaccatcggcaggaaacacagcagctccgttctgtgctgtggcggctggcctccaggtatctgcagccccgtgagtggaagaagctggcatattcctgggagttcacggaggcacatgtcgacgccatcgagcaacagtggacaggcaccaggagctatcaggagcacggccaccgaatgctgctcatttggctgcatggcgtggccacggctggtgagaaccccagcaaagcgctgttcgagggcctcgtggccattggcaggagggacctggctggctggagtacaatggcgagatctcagctcacggcaacctccgcctcccgggttcaaatgattctcgtgcctcagcctcccgagtagctgggattacaggtgcatgccatcacagctggctaatttttgtattttta

SEQ ID NO: 162 - protein, 399 aa, Homo sapiens; identical to SEQ ID NO: 156

SEQ ID NO: 163 - DNA, 1631 bp, Homo sapiens
atggatcaatggtcaagccaggggggatttgctctgccacaggctactggaaagcagctttttgcctcacagatgtccacaaaatgccttattttacaagactcattttgttcttgttttgcttgatggttctcgtggagagcagaaaacccaagaggaagcgatggacagggcaggtggaaatgcccaagccaagtcacttatataagaagaaccttgatgtgaccaagatccggaagggaaagcctcagcagcttctcagagtggacgagcacgacttcagcatgagacccgccttcggaggccctgccatcccggtgggcgtggacgtacaggtggagagcctggacagcatctccgaggtggacatggacttcactatgaccctgtacctgcggcattactggaaggatgagaggctagctttctccagcgccagcaacaagagcatgaccttcgatggccggctggtgaagaagatctgggtccctgatgtcttctttgttcactccaaaagatcgttcactcatgacaccaccactgacaacatcatgctgagggtgttcccagatggacacgtgctgtacagcatgaggattacggtcactgccatgtgcaacatggacttcagccactttcccctggactcccagacctgttctttggagctggagagctatgcctatacagatgaagatctaatgctgtactggaagaatggggatgaatccctaaaaacagatgagaagatctccttgtctcagtttctgattcagaaatttcacacaacttccaggctggccttctacagcagcactggctggtacaaccgtctgtacattaacttcacgttgcgtcgccacatcttcttcttcttgctccaaacatatttccctgccactctgatggtcatgctgtcctgggtgtccttctggatcgaccgcagagctgtgcctgccagagtttcactgggtatcacgacggtgctgaccatgaccaccatcatcacgggcgtgaatgcctccatgccgcgcgtctcctacgtcaaggccgtggacatctacctctgggtcagctttgtgttcgtgttcctctcggtgctggagtatgcggctgtcaactacctgaccaccgtgcaggagcgcaaggaacggaagctgcgggagaagttcccgtgcatgtgtggaatgcttcattcaaaaaccatgatgctggatggaagctacagtgagtctgaggccaacagcctggctgggtaccccagaagccatatcctgacagaagaagaaaggcaagacaaaatagtggtccacctgggcctgagtggtgaagccaacgctgccagaaagaaggggcttctgaagggccagacgggttttcgtatcttccagaatacccatgccattgacaaatactctaggttgatattccctgcctcctacatatttttcaacttaatttattggtcagtgttttcctaggggctccaaggctgttcctagaagagggcatagacatcgagggggcctggccagtcattgacagacggacttgttgaccacacgcccctcaccaaacaatgcagcagctactggaccaccctgagcagcactcatctctcagagaagccc

SEQ ID NO: 164 - protein, 465 aa, Homo sapiens
MPYFTRLILFLFCLMVLVESRKPKRKRWTGQVEMPKPSHLYKKNLDVTKIRKGKPQQLLRVDEHDFSMRPAFGGPAIPVGVDVQVESLDSISEVDMDFTMTLYLRHYWKDERLAFSSASNKSMTFDGRLVKKIWVPDVFFVHSKRSFTHDTTTDNIMLRVFPDGHVLYSMRITVTAMCNMDFSHFPLDSQTCSLELESYAYTDEDLMLYWKNGDESLKTDEKISLSQFLIQKFHTTSRLAFYSSTGWYNRLYINFTLRRHIFFFLLQTYFPATLMVMLSWVSFWIDRRAVPARVSLGITTVLTMTTIITGVNASMPRVSYVKAVDIYLWVSFVFVFLSVLEYAAVNYLTTVQERKERKLREKFPCMCGMLHSKTMMLDGSYSESEANSLAGYPRSHILTEEERQDKIVVHLGLSGEANAARKKGLLKGQTGFRIFQNTHAIDKYSRLIFPASYIFFNLIYWSVFS

SEQ ID NO: 165 - DNA, 1682 bp, Homo sapiens
ggccagccttgccctcacagcccctcagagcagcccgtcaggaggcagcagatggatcaatggtcaagccaggggggatttgctctgccacaggctactggaaagcagctttttgcctcacagatgtccacaaaatgccttattttacaagactcattttgttcttgttttgcttgatggttctcgtggagagcagaaaacccaagaggaagcgatggacagggcaggtggaaatgcccaagccaagtcacttatataagaagaaccttgatgtgaccaagatccggaagggaaagcctcagcagcttctcagagtggacgagcacgacttcagcatgagacccgccttcggaggccctgccatcccggtgggcgtggacgtacaggtggagagcctggacagcatctccgaggtggacatggacttcactatgaccctgtacctgcggcattactggaaggatgagaggctagctttctccagcgccagcaacaagagcatgaccttcgatggccggctggtgaagaagatctgggtccctgatgtcttctttgttcactccaaaagatcgttcactcatgacaccaccactgacaacatcatgctgagggtgttcccagatggacacgtgctgtacagcatgaggattacggtcactgccatgtgcaacatggacttcagccactttcccctggactcccagacctgttctttggagctggagagctatgcctatacagatgaagatctaatgctgtactggaagaatggggatgaatccctaaaaacagatgagaagatctccttgtctcagtttctgattcagaaatttcacacaacttccaggctggccttctacagcagcactggctggtacaaccgtctgtacattaacttcacgttgcgtcgccacatcttcttcttcttgctccaaacatatttccctgccactctgatggtcatgctgtcctgggtgtccttctggatcgaccgcagagctgtgcctgccagagtttcactgggtatcacgacggtgctgaccatgaccaccatcatcacgggcgtgaatgcctccatgccgcgcgtctcctacgtcaaggccgtggacatctacctctgggtcagctttgtgttcgtgttcctctcggtgctggagtatgcggctgtcaactacctgaccaccgtgcaggagcgcaaggaacggaagctgcgggagaagttcccgtgcatgtgtggaatgcttcattcaaaaaccatgatgctggatggaagctacagtgagtctgaggccaacagcctggctgggtaccccagaagccatatcctgacagaagaagaaaggcaagacaaaatagtggtccacctgggcctgagtggtgaagccaacgctgccagaaagaaggggcttctgaagggccagacgggttttcgtatcttccagaatacccatgccattgacaaatactctaggttgatattccctgcctcctacatatttttcaacttaatttattggtcagtgttttcctaggggctccaaggctgttcctagaagagggcatagacatcgagggggcctggccagtcattgacagacggacttgttgaccacacgcccctcaccaaacaatgcagcagctactggaccaccctgagcagcactcatctctcagagaagccc

SEQ ID NO: 166 - protein, 490 aa, Homo sapiens
MVKPGGICSATGYWKAAFCLTDVHKMPYFTRLILFLFCLMVLVESRKPKRKRWTGQVEMPKPSHLYKKNLDVTKIRKGKPQQLLRVDEHDFSMRPAFGGPAIPVGVDVQVESLDSISEVDMDFTMTLYLRHYWKDERLAFSSASNKSMTFDGRLVKKIWVPDVFFVHSKRSFTHDTTTDNIMLRVFPDGHVLYSMRITVTAMCNMDFSHFPLDSQTCSLELESYAYTDEDLMLYWKNGDESLKTDEKISLSQFLIQKFHTTSRLAFYSSTGWYNRLYINFTLRRHIFFFLLQTYFPATLMVMLSWVSFWIDRRAVPARVSLGITTVLTMTTIITGVNASMPRVSYVKAVDIYLWVSFVFVFLSVLEYAAVNYLTTVQERKERKLREKFPCMCGMLHSKTMMLDGSYSESEANSLAGYPRSHILTEEERQDKIVVHLGLSGEANAARKKGLLKGQTGFRIFQNTHAIDKYSRLIFPASYIFFNLIYWSVFS

SEQ ID NO: 167 - DNA, 1692 bp, Homo sapiens
atgcccagtaagttcagctgccggcagctccgggaggcgggccagtgtttcgagagtttcctggtcgttcggggactggacatggagacagatcgcgagcggctgcggaccatttataaccgcgacttcaagatcagctttgggacccccgcccctggcttctcctccatgctgtatggaatgaagattgcaaatctggcctacgtcaccaagactcgggtcaggttcttcagactcgaccgctgggccgacgtgcggttcccagaaaagaggagaatgaagctggggtcagatatcagcaaacaccacaagtcactgctagccaagatcttttatgacagggctgagtatcttcatgggaaacatggtgtggatgtggaagtccaggggccccatgaagcccgagatgggcagctccttatccgcctggatttgaaccgcaaagaggtgctgaccctgaggcttcggaatggcggaacccagtctgttaccctcactcacctcttcccactctgccggacaccccagtttgctttctacaatgaagaccaggagttgccctgtccactgggccccggtgaatgctatgaactccatgtccattgtaagaccagctttgtgggctacttcccagccacagtgctctgggagctgctgggacctggggagtcgggttcagaaggagccggcacattctacattgcccgcttcttggctgccgtcgcccacagccccctggctgcacagctgaagcccatgactcccttcaagcggacccggatcaccggaaaccctgtggtgaccaatcggatagaggaaggagagagacctgaccgcgctaagggctatgacctggagttaagtatggcgctggggacatactacccacctccccgcctcaggcagctgctccccatgcttcttcagggaacaagtatcttcactgcccctaaggagatcgcagagatcaaggcccagctggagacagccctgaagtggaggaactatgaggtgaagctgcggctgctgctgcacctggaggaactgcagatggagcatgatatccggcactatgacctggagtcggtgcccatgacctgggaccctgtggaccagaaccccaggctgctcacgctggaggttcctggagtgactgagagccgcccctcagtgctacggggcgaccacctgtttgcccttttgtcctcggagacacaccaggaggaccccatcacatataagggctttgtgcacaaggtggaattggaccgtgtcaagctgagcttttccatgagcctcctgagccgctttgtggatgggctgaccttcaaggtgaactttaccttcaaccgccagccgctgcgagtccagcaccgtgccctggagctgacagggcgctggctgctgtggcccatgctctttcctgtggcacctcgggacgtcccgctgctgccctcagatgtgaaactcaagctgtacgaccggagtctggagtcaaacccagagcagctgcaggccatgaggcacattgttacgggcaccacccgtccagccttaactgcctgcctgaccctgaaccagaacccagctgaactgcccctccaagggacaggaaggctgggggagggagtttacaacccaagccattccaccccctcccctgctggggagaatgacacatcaagctgctaa

SEQ ID NO: 168 - protein, 563 aa, Homo sapiens
MPSKFSCRQLREAGQCFESFLVVRGLDMETDRERLRTIYNRDFKISFGTPAPGFSSMLYGMKIANLAYVTKTRVRFFRLDRWADVRFPEKRRMKLGSDISKHHKSLLAKIFYDRAEYLHGKHGVDVEVQGPHEARDGQLLIRLDLNRKEVLTLRLRNGGTQSVTLTHLFPLCRTPQFAFYNEDQELPCPLGPGECYELHVHCKTSFVGYFPATVLWELLGPGESGSEGAGTFYIARFLAAVAHSPLAAQLKPMTPFKRTRITGNPVVTNRIEEGERPDRAKGYDLELSMALGTYYPPPRLRQLLPMLLQGTSIFTAPKEIAEIKAQLETALKWRNYEVKLRLLLHLEELQMEHDIRHYDLESVPMTWDPVDQNPRLLTLEVPGVTESRPSVLRGDHLFALLSSETHQEDPITYKGFVHKVELDRVKLSFSMSLLSRFVDGLTFKVNFTFNRQPLRVQHRALELTGRWLLWPMLFPVAPRDVPLLPSDVKLKLYDRSLESNPEQLQAMRHIVTGTTRPALTACLTLNQNPAELPLQGTGRLGEGVYNPSHSTPSPAGENDTSSC

SEQ ID NO: 169 - DNA, 3012 bp, Homo sapiens
atgcccagtaagttcagctgccggcagctccgggaggcgggccagtgtttcgagagtttcctggtcgttcggggactggacatggagacagatcgcgagcggctgcggaccatttataaccgcgacttcaagatcagctttgggacccccgcccctggcttctcctccatgctgtatggaatgaagattgcaaatctggcctacgtcaccaagactcgggtcaggttcttcagactcgaccgctgggccgacgtgcggttcccagaaaagaggagaatgaagctggggtcagatatcagcaaacaccacaagtcactgctagccaagatcttttatgacagggctgagtatcttcatgggaaacatggtgtggatgtggaagtccaggggccccatgaagcccgagatgggcagctccttatccgcctggatttgaaccgcaaagaggtgctgaccctgaggcttcggaatggcggaacccagtctgttaccctcactcacctcttcccactctgccggacaccccagtttgctttctacaatgaagaccaggagttgccctgtccactgggccccggtgaatgctatgaactccatgtccattgtaagaccagctttgtgggctacttcccagccacagtgctctgggagctgctgggacctggggagtcgggttcagaaggagccggcacattctacattgcccgcttcttggctgccgtcgcccacagccccctggctgcacagctgaagcccatgactcccttcaagcggacccggatcaccggaaaccctgtggtgaccaatcggatagaggaaggagagagacctgaccgcgctaagggctatgacctggagttaagtatggcgctggggacatactacccacctccccgcctcaggcagctgctccccatgcttcttcagggaacaagtatcttcactgcccctaaggagatcgcagagatcaaggcccagctggagacagccctgaagtggaggaactatgaggtgaagctgcggctgctgctgcacctggaggaactgcagatggagcatgatatccggcactatgacctggagtcggtgcccatgacctgggaccctgtggaccagaaccccaggctgctcacgctggaggttcctggagtgactgagagccgcccctcagtgctacggggcgaccacctgtttgcccttttgtcctcggagacacaccaggaggaccccatcacatataagggctttgtgcacaaggtggaattggaccgtgtcaagctgagcttttccatgagcctcctgagccgctttgtggatgggctgaccttcaaggtgaactttaccttcaaccgccagccgctgcgagtccagcaccgtgccctggagctgacagggcgctggctgctgtggcccatgctctttcctgtggcacctcgggacgtcccgctgctgccctcagatgtgaaactcaagctgtacgaccggagtctggagtcaaacccagagcagctgcaggccatgaggcacattgttacgggcaccacccgtccagccccctacatcatctttgggcctccaggcaccggcaagactgtcacgttagtggaggcaattaagcaggtggtgaagcacttgcccaaagcccacatcttggcctgcgctccatccaactcaggggctgacctactctgtcaaaggctccgggtccaccttcctagctccatctaccgcctcctggcccccagcagggacatccgcatggtacctgaggacatcaagccctgctgcaactgggacgcaaagaagggggagtatgtatttcccgccaagaagaagctgcaggaataccgggtcttaattaccaccctcatcactgccggcaggttggtctcggcccagtttcccattgatcacttcacacacatcttcatcgatgaggctggccactgcatggagcctgagagtctggtagctatagcagggctgatggaagtaaaggaaacaggtgatccaggagggcagctggtgctggcaggagaccctcggcagctggggcctgtgctgcgttccccactgacccagaagcatggactgggatactcactgctggagcggctgctcacctacaactccctgtacaagaagggccctgatggctatgacccccagttcataaccaagctgctccgcaactacaggtctcatcccaccatcctggacattcctaaccagctctattatgaaggggagctgcaggcctgtgctgatgtcgtggatcgagaacgcttctgccgctgggcgggcctacctcgacagggctttcccatcatctttcacggcgtaatgggcaaagatgagcgtgaaggcaacagcccatccttcttcaaccctgaagaggctgccacagtgacttcctacctgaagctgctcctggccccctcctccaagaagggcaaagctcgcctgagccctcgaagtgtgggcgtcatctccccgtaccggaaacaggtggagaaaatccgttactgcatcaccaaacttgacagggagcttcgaggactggatgacatcaaggacttgaaggtgggttcagtagaagaattccaaggccaagaacgaagcgtcatcctcatctccaccgtgcgaagcagccagagctttgtgcagctggatctggactttaatctgggtttccttaagaaccccaagaggttcaatgtagctgtgacccgggccaaggccctgctcatcatcgtggggaacccccttctcctgggccatgaccctgactggaaagtattcctggagttctgtaaagaaaacggagggtataccgggtgtcccttccctgccaaactggacctgcaacagggacagaatttactgcaaggtctgagcaagctcagcccctctacctcagggccccacagccatgactacctcccccaggagcgggagggtgaagggggcctgtctctgcaagtggagccagagtggaggaatgagctctga

SEQ ID NO: 170 - protein, 1003 aa, Homo sapiens
MPSKFSCRQLREAGQCFESFLVVRGLDMETDRERLRTIYNRDFKISFGTPAPGFSSMLYGMKIANLAYVTKTRVRFFRLDRWADVRFPEKRRMKLGSDISKHHKSLLAKIFYDRAEYLHGKHGVDVEVQGPHEARDGQLLIRLDLNRKEVLTLRLRNGGTQSVTLTHLFPLCRTPQFAFYNEDQELPCPLGPGECYELHVHCKTSFVGYFPATVLWELLGPGESGSEGAGTFYIARFLAAVAHSPLAAQLKPMTPFKRTRITGNPVVTNRIEEGERPDRAKGYDLELSMALGTYYPPPRLRQLLPMLLQGTSIFTAPKEIAEIKAQLETALKWRNYEVKLRLLLHLEELQMEHDIRHYDLESVPMTWDPVDQNPRLLTLEVPGVTESRPSVLRGDHLFALLSSETHQEDPITYKGFVHKVELDRVKLSFSMSLLSRFVDGLTFKVNFTFNRQPLRVQHRALELTGRWLLWPMLFPVAPRDVPLLPSDVKLKLYDRSLESNPEQLQAMRHIVTGTTRPAPYIIFGPPGTGKTVTLVEAIKQVVKHLPKAHILACAPSNSGADLLCQRLRVHLPSSIYRLLAPSRDIRMVPEDIKPCCNWDAKKGEYVFPAKKKLQEYRVLITTLITAGRLVSAQFPIDHFTHIFIDEAGHCMEPESLVAIAGLMEVKETGDPGGQLVLAGDPRQLGPVLRSPLTQKHGLGYSLLERLLTYNSLYKKGPDGYDPQFITKLLRNYRSHPTILDIPNQLYYEGELQACADVVDRERFCRWAGLPRQGFPIIFHGVMGKDEREGNSPSFFNPEEAATVTSYLKLLLAPSSKKGKARLSPRSVGVISPYRKQVEKIRYCITKLDRELRGLDDIKDLKVGSVEEFQGQERSVILISTVRSSQSFVQLDLDFNLGFLKNPKRFNVAVTRAKALLIIVGNPLLLGHDPDWKVFLEFCKENGGYTGCPFPAKLDLQQGQNLLQGLSKLSPSTSGPHSHDYLPQEREGEGGLSLQVEPEWRNEL

SEQ ID NO: 171 - DNA, 2844 bp, Homo sapiens
atgctgtatggaatgaagattgcaaatctggcctacgtcaccaagactcgggtcaggttcttcagactcgaccgctgggccgacgtgcggttcccagaaaagaggagaatgaagctggggtcagatatcagcaaacaccacaagtcactgctagccaagatcttttatgacagggctgagtatcttcatgggaaacatggtgtggatgtggaagtccaggggccccatgaagcccgagatgggcagctccttatccgcctggatttgaaccgcaaagaggtgctgaccctgaggcttcggaatggcggaacccagtctgttaccctcactcacctcttcccactctgccggacaccccagtttgctttctacaatgaagaccaggagttgccctgtccactgggccccggtgaatgctatgaactccatgtccattgtaagaccagctttgtgggctacttcccagccacagtgctctgggagctgctgggacctggggagtcgggttcagaaggagccggcacattctacattgcccgcttcttggctgccgtcgcccacagccccctggctgcacagctgaagcccatgactcccttcaagcggacccggatcaccggaaaccctgtggtgaccaatcggatagaggaaggagagagacctgaccgcgctaagggctatgacctggagttaagtatggcgctggggacatactacccacctccccgcctcaggcagctgctccccatgcttcttcagggaacaagtatcttcactgcccctaaggagatcgcagagatcaaggcccagctggagacagccctgaagtggaggaactatgaggtgaagctgcggctgctgctgcacctggaggaactgcagatggagcatgatatccggcactatgacctggagtcggtgcccatgacctgggaccctgtggaccagaaccccaggctgctcacgctggaggttcctggagtgactgagagccgcccctcagtgctacggggcgaccacctgtttgcccttttgtcctcggagacacaccaggaggaccccatcacatataagggctttgtgcacaaggtggaattggaccgtgtcaagctgagcttttccatgagcctcctgagccgctttgtggatgggctgaccttcaaggtgaactttaccttcaaccgccagccgctgcgagtccagcaccgtgccctggagctgacagggcgctggctgctgtggcccatgctctttcctgtggcacctcgggacgtcccgctgctgccctcagatgtgaaactcaagctgtacgaccggagtctggagtcaaacccagagcagctgcaggccatgaggcacattgttacgggcaccacccgtccagccccctacatcatctttgggcctccaggcaccggcaagactgtcacgttagtggaggcaattaagcaggtggtgaagcacttgcccaaagcccacatcttggcctgcgctccatccaactcaggggctgacctactctgtcaaaggctccgggtccaccttcctagctccatctaccgcctcctggcccccagcagggacatccgcatggtacctgaggacatcaagccctgctgcaactgggacgcaaagaagggggagtatgtatttcccgccaagaagaagctgcaggaataccgggtcttaattaccaccctcatcactgccggcaggttggtctcggcccagtttcccattgatcacttcacacacatcttcatcgatgaggctggccactgcatggagcctgagagtctggtagctatagcagggctgatggaagtaaaggaaacaggtgatccaggagggcagctggtgctggcaggagaccctcggcagctggggcctgtgctgcgttccccactgacccagaagcatggactgggatactcactgctggagcggctgctcacctacaactccctgtacaagaagggccctgatggctatgacccccagttcataaccaagctgctccgcaactacaggtctcatcccaccatcctggacattcctaaccagctctattatgaaggggagctgcaggcctgtgctgatgtcgtggatcgagaacgcttctgccgctgggcgggcctacctcgacagggctttcccatcatctttcacggcgtaatgggcaaagatgagcgtgaaggcaacagcccatccttcttcaaccctgaagaggctgccacagtgacttcctacctgaagctgctcctggccccctcctccaagaagggcaaagctcgcctgagccctcgaagtgtgggcgtcatctccccgtaccggaaacaggtggagaaaatccgttactgcatcaccaaacttgacagggagcttcgaggactggatgacatcaaggacttgaaggtgggttcagtagaagaattccaaggccaagaacgaagcgtcatcctcatctccaccgtgcgaagcagccagagctttgtgcagctggatctggactttaatctgggtttccttaagaaccccaagaggttcaatgtagctgtgacccgggccaaggccctgctcatcatcgtggggaacccccttctcctgggccatgaccctgactggaaagtattcctggagttctgtaaagaaaacggagggtataccgggtgtcccttccctgccaaactggacctgcaacagggacagaatttactgcaaggtctgagcaagctcagcccctctacctcagggccccacagccatgactacctcccccaggagcgggagggtgaagggggcctgtctctgcaagtggagccagagtggaggaatgagctctga

SEQ ID NO: 172 - protein, 947 aa, Homo sapiens
MLYGMKIANLAYVTKTRVRFFRLDRWADVRFPEKRRMKLGSDISKHHKSLLAKIFYDRAEYLHGKHGVDVEVQGPHEARDGQLLIRLDLNRKEVLTLRLRNGGTQSVTLTHLFPLCRTPQFAFYNEDQELPCPLGPGECYELHVHCKTSFVGYFPATVLWELLGPGESGSEGAGTFYIARFLAAVAHSPLAAQLKPMTPFKRTRITGNPVVTNRIEEGERPDRAKGYDLELSMALGTYYPPPRLRQLLPMLLQGTSIFTAPKEIAEIKAQLETALKWRNYEVKLRLLLHLEELQMEHDIRHYDLESVPMTWDPVDQNPRLLTLEVPGVTESRPSVLRGDHLFALLSSETHQEDPITYKGFVHKVELDRVKLSFSMSLLSRFVDGLTFKVNFTFNRQPLRVQHRALELTGRWLLWPMLFPVAPRDVPLLPSDVKLKLYDRSLESNPEQLQAMRHIVTGTTRPAPYIIFGPPGTGKTVTLVEAIKQVVKHLPKAHILACAPSNSGADLLCQRLRVHLPSSIYRLLAPSRDIRMVPEDIKPCCNWDAKKGEYVFPAKKKLQEYRVLITTLITAGRLVSAQFPIDHFTHIFIDEAGHCMEPESLVAIAGLMEVKETGDPGGQLVLAGDPRQLGPVLRSPLTQKHGLGYSLLERLLTYNSLYKKGPDGYDPQFITKLLRNYRSHPTILDIPNQLYYEGELQACADVVDRERFCRWAGLPRQGFPIIFHGVMGKDEREGNSPSFFNPEEAATVTSYLKLLLAPSSKKGKARLSPRSVGVISPYRKQVEKIRYCITKLDRELRGLDDIKDLKVGSVEEFQGQERSVILISTVRSSQSFVQLDLDFNLGFLKNPKRFNVAVTRAKALLIIVGNPLLLGHDPDWKVFLEFCKENGGYTGCPFPAKLDLQQGQNLLQGLSKLSPSTSGPHSHDYLPQEREGEGGLSLQVEPEWRNEL

SEQ ID NO: 173 - DNA, 3012 bp, Homo sapiens; identical to SEQ ID NO: 169

SEQ ID NO: 174 - protein, 1003 aa, Homo sapiens; identical to SEQ ID NO: 170

SEQ ID NO: 175 - DNA, 3012 bp, Homo sapiens; identical to SEQ ID NO: 169

SEQ ID NO: 176 - protein, 1003 aa, Homo sapiens; identical to SEQ ID NO: 170

SEQ ID NO: 177 - DNA, 3012 bp, Homo sapiens; identical to SEQ ID NO: 169

SEQ ID NO: 178 - protein, 1003 aa, Homo sapiens; identical to SEQ ID NO: 170

SEQ ID NO: 179 - DNA, 2559 bp, Homo sapiens
cagagagcaatatggctggttccccaacatgcctcaccctcatctatatcctttggcagctcacagggtcagcagcctctggacccgtgaaagagctggtcggttccgttggtggggccgtgactttccccctgaagtccaaagtaaagcaagttgactctattgtctggaccttcaacacaacccctcttgtcaccatacagccagaagggggcactatcatagtgacccaaaatcgtaatagggagagagtagacttcccagatggaggctactccctgaagctcagcaaactgaagaagaatgactcagggatctactatgtggggatatacagctcatcactccagcagccctccacccaggagtacgtgctgcatgtctacgagcacctgtcaaagcctaaagtcaccatgggtctgcagagcaataagaatggcacctgtgtgaccaatctgacatgctgcatggaacatggggaagaggatgtgatttatacctggaaggccctggggcaagcagccaatgagtcccataatgggtccatcctccccatctcctggagatggggagaaagtgatatgaccttcatctgcgttgccaggaaccctgtcagcagaaacttctcaagccccatccttgccaggaagctctgtgaaggtgctgctgatgacccagattcctccatggtcctcctgtgtctcctgttggtgcccctcctgctcagtctctttgtactggggctatttctttggtttctgaagagagagagacaagaagagaacaatcctaaaggaagatccagcaaatacggtttactccactgtggaaataccgaaaaagatggaaaatccccactcactgctcacgatgccagacacaccaaggctatttgcctatgagaatgttatctagacagcagtgcactcccctaagtctctgctcaaaaaaaaaacaattctcggcccaaagaaaacaatcagaagaattcactgatttgactagaaacatcaaggaagaatgaagaacgttgacttttttccaggataaattatctctgatgcttctttagatttaagagttcataattccatccactgctgagaaatctcctcaaacccagaaggtttaatcacttcatcccaaaaatgggattgtgaatgtcagcaaaccataaaaaaagtgcttagaagtattcctataaaaatgtaaatgcaaggtcacacatattaatgacagcctgttgtattaatgatggctccaggtcagtgtctggagtttcattccatcccagggcttggatgtcaggattataccaagagtcttgctaccaggagggcaagaagaccaaaacagacagacaagtccagcagaagcagatgcacctgacaaaaatggatgtattaattggctctataaactatgtgcccagcactatgctgagcttacactaattggtcagacatgctgtctgccctcatgaaattggctccaaatgaatgaactactttcatgagcagttgtagcaggcctgaccacagattcccagagggccaggtgtggatccacaggacttgaaggtcaaagttcacaaagatgaagaatcagggtagctgaccatgtttggcagatactataatggagacacagaagtgtgcatggcccaaggacaaggacctccagccaggcttcatttatgcacttgtgctgcaaaagaaaagtctaggttttaaggctgtgccagaacccatcccaataaagagaccgagtctgaagtcacattgtaaatctagtgtaggagacttggagtcaggcagtgagactggtggggcacggggggcagtgggtacttgtaaacctttaaagatggttaattcattcaatagatatttattaagaacctatgcggcccggcatggtggctcacacctgtaatcccagcactttgggaggccaaggtgggtgggtcatctgaggtcaggagttcaagaccagcctggccaacatggtgaaaccccatctctactaaagatacaaaaatttgctgagcgtggtggtgtgcacctgtaatcccagctactcgagaggccaaggcatgagaatcgcttgaacctgggaggtggaggttgcagtgagctgagatggcaccactgcactccggcctaggcaacgagagcaaaactccaatacaaacaaacaaacaaacacctgtgctaggtcagtctggcacgtaagatgaacatccctaccaatacagagctcaccatctcttatacttaagtgaaaaacatggggaaggggaaaggggaatggctgcttttgatatgttccctgacacatatcttgaatggagacctccctaccaagtgatgaaagtgttgaaaaacttaataacaaatgcttgttgggcaagaatgggattgaggattatcttctctcagaaaggcattgtgaaggaattgagccagatctctctccctactgcaaaaccctattgtagtaaaaaagtcttctttactatcttaataaaacagatattgtgagattcacatacaaaaa

SEQ ID NO: 180 - protein, 296 aa, Homo sapiens
MAGSPTCLTLIYILWQLTGSAASGPVKELVGSVGGAVTFPLKSKVKQVDSIVWTFNTTPLVTIQPEGGTIIVTQNRNRERVDFPDGGYSLKLSKLKKNDSGIYYVGIYSSSLQQPSTQEYVLHVYEHLSKPKVTMGLQSNKNGTCVTNLTCCMEHGEEDVIYTWKALGQAANESHNGSILPISWRWGESDMTFICVARNPVSRNFSSPILARKLCEGAADDPDSSMVLLCLLLVPLLLSLFVLGLFLWFLKRERQEENNPKGRSSKYGLLHCGNTEKDGKSPLTAHDARHTKAICL

SEQ ID NO: 181 - DNA, 2365 bp, Homo sapiens
gcttcatttcagtggctgacttccagagagcaatatggctggttccccaacatgcctcaccctcatctatatcctttggcagctcacagagcacctgtcaaagcctaaagtcaccatgggtctgcagagcaataagaatggcacctgtgtgaccaatctgacatgctgcatggaacatggggaagaggatgtgatttatacctggaaggccctggggcaagcagccaatgagtcccataatgggtccatcctccccatctcctggagatggggagaaagtgatatgaccttcatctgcgttgccaggaaccctgtcagcagaaacttctcaagccccatccttgccaggaagctctgtgaaggtgctgctgatgacccagattcctccatggtcctcctgtgtctcctgttggtgcccctcctgctcagtctctttgtactggggctatttctttggtttctgaagagagagagacaagaagagtacattgaagagaagaagagagtggacatttgtcgggaaactcctaacatatgcccccattctggagagaacacagagtacgacacaatccctcacactaatagaacaatcctaaaggaagatccagcaaatacggtttactccactgtggaaataccgaaaaagatggaaaatccccactcactgctcacgatgccagacacaccaaggctatttgcctatgagaatgttatctagacagcagtgcactcccctaagtctctgctcaaaaaaaaaacaattctcggcccaaagaaaacaatcagaagaattcactgatttgactagaaacatcaaggaagaatgaagaacgttgacttttttccaggataaattatctctgatgcttctttagatttaagagttcataattccatccactgctgagaaatctcctcaaacccagaaggtttaatcacttcatcccaaaaatgggattgtgaatgtcagcaaaccataaaaaaagtgcttagaagtattcctataaaaatgtaaatgcaaggtcacacatattaatgacagcctgttgtattaatgatggctccaggtcagtgtctggagtttcattccatcccagggcttggatgtcaggattataccaagagtcttgctaccaggagggcaagaagaccaaaacagacagacaagtccagcagaagcagatgcacctgacaaaaatggatgtattaattggctctataaactatgtgcccagcactatgctgagcttacactaattggtcagacatgctgtctgccctcatgaaattggctccaaatgaatgaactactttcatgagcagttgtagcaggcctgaccacagattcccagagggccaggtgtggatccacaggacttgaaggtcaaagttcacaaagatgaagaatcagggtagctgaccatgtttggcagatactataatggagacacagaagtgtgcatggcccaaggacaaggacctccagccaggcttcatttatgcacttgtgctgcaaaagaaaagtctaggttttaaggctgtgccagaacccatcccaataaagagaccgagtctgaagtcacattgtaaatctagtgtaggagacttggagtcaggcagtgagactggtggggcacggggggcagtgggtacttgtaaacctttaaagatggttaattcattcaatagatatttattaagaacctatgcggcccggcatggtggctcacacctgtaatcccagcactttgggaggccaaggtgggtgggtcatctgaggtcaggagttcaagaccagcctggccaacatggtgaaaccccatctctactaaagatacaaaaatttgctgagcgtggtggtgtgcacctgtaatcccagctactcgagaggccaaggcatgagaatcgcttgaacctgggaggtggaggttgcagtgagctgagatggcaccactgcactccggcctaggcaacgagagcaaaactccaatacaaacaaacaaacaaacacctgtgctaggtcagtctggcacgtaagatgaacatccctaccaatacagagctcaccatctcttatacttaagtgaaaaacatggggaaggggaaaggggaatggctgcttttgatatgttccctgacacatatcttgaatggagacctccctaccaagtgatgaaagtgttgaaaaacttaataacaaatgcttgttgggcaagaatgggattgaggattatcttctctcagaaaggcattgtgaaggaattgagccagatctctctccctactgcaaaaccctattgtagtaaaaaagtcttctttactatcttaataaaacagatattgtgagattcacatacaaaaa

SEQ ID NO: 182 - protein, 228 aa, Homo sapiens
MAGSPTCLTLIYILWQLTEHLSKPKVTMGLQSNKNGTCVTNLTCCMEHGEEDVIYTWKALGQAANESHNGSILPISWRWGESDMTFICVARNPVSRNFSSPILARKLCEGAADDPDSSMVLLCLLLVPLLLSLFVLGLFLWFLKRERQEEYIEEKKRVDICRETPNICPHSGENTEYDTIPHTNRTILKEDPANTVYSTVEIPKKMENPHSLLTMPDTPRLFAYENVI

SEQ ID NO: 183 - DNA, 2689 bp, Homo sapiens
gtggcttcatttcagtggctgacttccagagagcaatatggctggttccccaacatgcctcaccctcatctatatcctttggcagctcacagggtcagcagcctctggacccgtgaaagagctggtcggttccgttggtggggccgtgactttccccctgaagtccaaagtaaagcaagttgactctattgtctggaccttcaacacaacccctcttgtcaccatacagccagaagggggcactatcatagtgacccaaaatcgtaatagggagagagtagacttcccagatggaggctactccctgaagctcagcaaactgaagaagaatgactcagggatctactatgtggggatatacagctcatcactccagcagccctccacccaggagtacgtgctgcatgtctacgagcacctgtcaaagcctaaagtcaccatgggtctgcagagcaataagaatggcacctgtgtgaccaatctgacatgctgcatggaacatggggaagaggatgtgatttatacctggaaggccctggggcaagcagccaatgagtcccataatgggtccatcctccccatctcctggagatggggagaaagtgatatgaccttcatctgcgttgccaggaaccctgtcagcagaaacttctcaagccccatccttgccaggaagctctgtgaaggtgctgctgatgacccagattcctccatggtcctcctgtgtctcctgttggtgcccctcctgctcagtctctttgtactggggctatttctttggtttctgaagagagagagacaagaagagtacattgaagagaagaagagagtggacatttgtcgggaaactcctaacatatgcccccattctggagagaacacagagtacgacacaatccctcacactaatagaacaatcctaaaggaagatccagcaaatacggtttactccactgtggaaataccgaaaaagatggaaaatccccactcactgctcacgatgccagacacaccaaggctatttgcctatgagaatgttatctagacagcagtgcactcccctaagtctctgctcaaaaaaaaaacaattctcggcccaaagaaaacaatcagaagaattcactgatttgactagaaacatcaaggaagaatgaagaacgttgacttttttccaggataaattatctctgatgcttctttagatttaagagttcataattccatccactgctgagaaatctcctcaaacccagaaggtttaatcacttcatcccaaaaatgggattgtgaatgtcagcaaaccataaaaaaagtgcttagaagtattcctataaaaatgtaaatgcaaggtcacacatattaatgacagcctgttgtattaatgatggctccaggtcagtgtctggagtttcattccatcccagggcttggatgtcaggattataccaagagtcttgctaccaggagggcaagaagaccaaaacagacagacaagtccagcagaagcagatgcacctgacaaaaatggatgtattaattggctctataaactatgtgcccagcactatgctgagcttacactaattggtcagacatgctgtctgccctcatgaaattggctccaaatgaatgaactactttcatgagcagttgtagcaggcctgaccacagattcccagagggccaggtgtggatccacaggacttgaaggtcaaagttcacaaagatgaagaatcagggtagctgaccatgtttggcagatactataatggagacacagaagtgtgcatggcccaaggacaaggacctccagccaggcttcatttatgcacttgtgctgcaaaagaaaagtctaggttttaaggctgtgccagaacccatcccaataaagagaccgagtctgaagtcacattgtaaatctagtgtaggagacttggagtcaggcagtgagactggtggggcacggggggcagtgggtacttgtaaacctttaaagatggttaattcattcaatagatatttattaagaacctatgcggcccggcatggtggctcacacctgtaatcccagcactttgggaggccaaggtgggtgggtcatctgaggtcaggagttcaagaccagcctggccaacatggtgaaaccccatctctactaaagatacaaaaatttgctgagcgtggtggtgtgcacctgtaatcccagctactcgagaggccaaggcatgagaatcgcttgaacctgggaggtggaggttgcagtgagctgagatggcaccactgcactccggcctaggcaacgagagcaaaactccaatacaaacaaacaaacaaacacctgtgctaggtcagtctggcacgtaagatgaacatccctaccaatacagagctcaccatctcttatacttaagtgaaaaacatggggaaggggaaaggggaatggctgcttttgatatgttccctgacacatatcttgaatggagacctccctaccaagtgatgaaagtgttgaaaaacttaataacaaatgcttgttgggcaagaatgggattgaggattatcttctctcagaaaggcattgtgaaggaattgagccagatctctctccctactgcaaaaccctattgtagtaaaaaagtcttctttactatcttaataaaacagatattgtgagattcacatacaaaaa

SEQ ID NO: 184 - protein, 335 aa, Homo sapiens
MAGSPTCLTLIYILWQLTGSAASGPVKELVGSVGGAVTFPLKSKVKQVDSIVWTFNTTPLVTIQPEGGTIIVTQNRNRERVDFPDGGYSLKLSKLKKNDSGIYYVGIYSSSLQQPSTQEYVLHVYEHLSKPKVTMGLQSNKNGTCVTNLTCCMEHGEEDVIYTWKALGQAANESHNGSILPISWRWGESDMTFICVARNPVSRNFSSPILARKLCEGAADDPDSSMVLLCLLLVPLLLSLFVLGLFLWFLKRERQEEYIEEKKRVDICRETPNICPHSGENTEYDTIPHTNRTILKEDPANTVYSTVEIPKKMENPHSLLTMPDTPRLFAYENVI

SEQ ID NO: 185 - DNA, 2263 bp, Homo sapiens
cttccagagagcaatatggctggttccccaacatgcctcaccctcatctatatcctttggcagctcacagggtcagcagcctctggacccgtgaaagagctggtcggttccgttggtggggccgtgactttccccctgaagtccaaagtaaagcaagttgactctattgtctggaccttcaacacaacccctcttgtcaccatacagccagaagggggcactatcatagtgacccaaaatcgtaatagggagagagtagacttcccagatggaggctactccctgaagctcagcaaactgaagaagaatgactcagggatctactatgtggggatatacagctcatcactccagcagccctccacccaggagtacgtgctgcatgtctacgagtacattgaagagaagaagagagtggacatttgtcgggaaactcctaacatatgcccccattctggagagaacacagagtacgacacaatccctcacactaatagaacaatcctaaaggaagatccagcaaatacggtttactccactgtggaaataccgaaaaagatggaaaatccccactcactgctcacgatgccagacacaccaaggctatttgcctatgagaatgttatctagacagcagtgcactcccctaagtctctgctcaaaaaaaaaacaattctcggcccaaagaaaacaatcagaagaattcactgatttgactagaaacatcaaggaagaatgaagaacgttgacttttttccaggataaattatctctgatgcttctttagatttaagagttcataattccatccactgctgagaaatctcctcaaacccagaaggtttaatcacttcatcccaaaaatgggattgtgaatgtcagcaaaccataaaaaaagtgcttagaagtattcctataaaaatgtaaatgcaaggtcacacatattaatgacagcctgttgtattaatgatggctccaggtcagtgtctggagtttcattccatcccagggcttggatgtcaggattataccaagagtcttgctaccaggagggcaagaagaccaaaacagacagacaagtccagcagaagcagatgcacctgacaaaaatggatgtattaattggctctataaactatgtgcccagcactatgctgagcttacactaattggtcagacatgctgtctgccctcatgaaattggctccaaatgaatgaactactttcatgagcagttgtagcaggcctgaccacagattcccagagggccaggtgtggatccacaggacttgaaggtcaaagttcacaaagatgaagaatcagggtagctgaccatgtttggcagatactataatggagacacagaagtgtgcatggcccaaggacaaggacctccagccaggcttcatttatgcacttgtgctgcaaaagaaaagtctaggttttaaggctgtgccagaacccatcccaataaagagaccgagtctgaagtcacattgtaaatctagtgtaggagacttggagtcaggcagtgagactggtggggcacggggggcagtgggtacttgtaaacctttaaagatggttaattcattcaatagatatttattaagaacctatgcggcccggcatggtggctcacacctgtaatcccagcactttgggaggccaaggtgggtgggtcatctgaggtcaggagttcaagaccagcctggccaacatggtgaaaccccatctctactaaagatacaaaaatttgctgagcgtggtggtgtgcacctgtaatcccagctactcgagaggccaaggcatgagaatcgcttgaacctgggaggtggaggttgcagtgagctgagatggcaccactgcactccggcctaggcaacgagagcaaaactccaatacaaacaaacaaacaaacacctgtgctaggtcagtctggcacgtaagatgaacatccctaccaatacagagctcaccatctcttatacttaagtgaaaaacatggggaaggggaaaggggaatggctgcttttgatatgttccctgacacatatcttgaatggagacctccctaccaagtgatgaaagtgttgaaaaacttaataacaaatgcttgttgggcaagaatgggattgaggattatcttctctcagaaaggcattgtgaaggaattgagccagatctctctccctactgcaaaaccctattgtagtaaaaaagtcttctttactatcttaataaaacagatattgtgagattc

SEQ ID NO: 186 - protein, 204 aa, Homo sapiens
MAGSPTCLTLIYILWQLTGSAASGPVKELVGSVGGAVTFPLKSKVKQVDSIVWTFNTTPLVTIQPEGGTIIVTQNRNRERVDFPDGGYSLKLSKLKKNDSGIYYVGIYSSSLQQPSTQEYVLHVYEYIEEKKRVDICRETPNICPHSGENTEYDTIPHTNRTILKEDPANTVYSTVEIPKKMENPHSLLTMPDTPRLFAYENVI

SEQ ID NO: 187 - DNA, 2159 bp, Homo sapiens
cttccagagagcaatatggctggttccccaacatgcctcaccctcatctatatcctttggcagctcacagggtcagcagcctctggacccgtgaaagagctggtcggttccgttggtggggccgtgactttccccctgaagtccaaagtaaagcaagttgactctattgtctggaccttcaacacaacccctcttgtcaccatacagccagaagggggcactatcatagtgacccaaaatcgtaatagggagagagtagacttcccagatggaggctactccctgaagctcagcaaactgaagaagaatgactcagggatctactatgtggggatatacagctcatcactccagcagccctccacccaggagtacgtgctgcatgtctacgagaacaatcctaaaggaagatccagcaaatacggtttactccactgtggaaataccgaaaaagatggaaaatccccactcactgctcacgatgccagacacaccaaggctatttgcctatgagaatgttatctagacagcagtgcactcccctaagtctctgctcaaaaaaaaaacaattctcggcccaaagaaaacaatcagaagaattcactgatttgactagaaacatcaaggaagaatgaagaacgttgacttttttccaggataaattatctctgatgcttctttagatttaagagttcataattccatccactgctgagaaatctcctcaaacccagaaggtttaatcacttcatcccaaaaatgggattgtgaatgtcagcaaaccataaaaaaagtgcttagaagtattcctataaaaatgtaaatgcaaggtcacacatattaatgacagcctgttgtattaatgatggctccaggtcagtgtctggagtttcattccatcccagggcttggatgtcaggattataccaagagtcttgctaccaggagggcaagaagaccaaaacagacagacaagtccagcagaagcagatgcacctgacaaaaatggatgtattaattggctctataaactatgtgcccagcactatgctgagcttacactaattggtcagacatgctgtctgccctcatgaaattggctccaaatgaatgaactactttcatgagcagttgtagcaggcctgaccacagattcccagagggccaggtgtggatccacaggacttgaaggtcaaagttcacaaagatgaagaatcagggtagctgaccatgtttggcagatactataatggagacacagaagtgtgcatggcccaaggacaaggacctccagccaggcttcatttatgcacttgtgctgcaaaagaaaagtctaggttttaaggctgtgccagaacccatcccaataaagagaccgagtctgaagtcacattgtaaatctagtgtaggagacttggagtcaggcagtgagactggtggggcacggggggcagtgggtacttgtaaacctttaaagatggttaattcattcaatagatatttattaagaacctatgcggcccggcatggtggctcacacctgtaatcccagcactttgggaggccaaggtgggtgggtcatctgaggtcaggagttcaagaccagcctggccaacatggtgaaaccccatctctactaaagatacaaaaatttgctgagcgtggtggtgtgcacctgtaatcccagctactcgagaggccaaggcatgagaatcgcttgaacctgggaggtggaggttgcagtgagctgagatggcaccactgcactccggcctaggcaacgagagcaaaactccaatacaaacaaacaaacaaacacctgtgctaggtcagtctggcacgtaagatgaacatccctaccaatacagagctcaccatctcttatacttaagtgaaaaacatggggaaggggaaaggggaatggctgcttttgatatgttccctgacacatatcttgaatggagacctccctaccaagtgatgaaagtgttgaaaaacttaataacaaatgcttgttgggcaagaatgggattgaggattatcttctctcagaaaggcattgtgaaggaattgagccagatctctctccctactgcaaaaccctattgtagtaaaaaagtcttctttactatcttaataaaacagatattgtgagattc

SEQ ID NO: 188 - protein, 165 aa, Homo sapiens
MAGSPTCLTLIYILWQLTGSAASGPVKELVGSVGGAVTFPLKSKVKQVDSIVWTFNTTPLVTIQPEGGTIIVTQNRNRERVDFPDGGYSLKLSKLKKNDSGIYYVGIYSSSLQQPSTQEYVLHVYENNPKGRSSKYGLLHCGNTEKDGKSPLTAHDARHTKAICL

SEQ ID NO: 189 - DNA, 2374 bp, Homo sapiens
cttccagagagcaatatggctggttccccaacatgcctcaccctcatctatatcctttggcagctcacagagcacctgtcaaagcctaaagtcaccatgggtctgcagagcaataagaatggcacctgtgtgaccaatctgacatgctgcatggaacatggggaagaggatgtgatttatacctggaaggccctggggcaagcagccaatgagtcccataatgggtccatcctccccatctcctggagatggggagaaagtgatatgaccttcatctgcgttgccaggaaccctgtcagcagaaacttctcaagccccatccttgccaggaagctctgtgaaggtgactgcctctcccctctccacaggagactctgcccaggtgctgctgatgacccagattcctccatggtcctcctgtgtctcctgttggtgcccctcctgctcagtctctttgtactggggctatttctttggtttctgaagagagagagacaagaagagtacattgaagagaagaagagagtggacatttgtcgggaaactcctaacatatgcccccattctggagagaacacagagtacgacacaatccctcacactaatagaacaatcctaaaggaagatccagcaaatacggtttactccactgtggaaataccgaaaaagatggaaaatccccactcactgctcacgatgccagacacaccaaggctatttgcctatgagaatgttatctagacagcagtgcactcccctaagtctctgctcaaaaaaaaaacaattctcggcccaaagaaaacaatcagaagaattcactgatttgactagaaacatcaaggaagaatgaagaacgttgacttttttccaggataaattatctctgatgcttctttagatttaagagttcataattccatccactgctgagaaatctcctcaaacccagaaggtttaatcacttcatcccaaaaatgggattgtgaatgtcagcaaaccataaaaaaagtgcttagaagtattcctataaaaatgtaaatgcaaggtcacacatattaatgacagcctgttgtattaatgatggctccaggtcagtgtctggagtttcattccatcccagggcttggatgtcaggattataccaagagtcttgctaccaggagggcaagaagaccaaaacagacagacaagtccagcagaagcagatgcacctgacaaaaatggatgtattaattggctctataaactatgtgcccagcactatgctgagcttacactaattggtcagacatgctgtctgccctcatgaaattggctccaaatgaatgaactactttcatgagcagttgtagcaggcctgaccacagattcccagagggccaggtgtggatccacaggacttgaaggtcaaagttcacaaagatgaagaatcagggtagctgaccatgtttggcagatactataatggagacacagaagtgtgcatggcccaaggacaaggacctccagccaggcttcatttatgcacttgtgctgcaaaagaaaagtctaggttttaaggctgtgccagaacccatcccaataaagagaccgagtctgaagtcacattgtaaatctagtgtaggagacttggagtcaggcagtgagactggtggggcacggggggcagtgggtacttgtaaacctttaaagatggttaattcattcaatagatatttattaagaacctatgcggcccggcatggtggctcacacctgtaatcccagcactttgggaggccaaggtgggtgggtcatctgaggtcaggagttcaagaccagcctggccaacatggtgaaaccccatctctactaaagatacaaaaatttgctgagcgtggtggtgtgcacctgtaatcccagctactcgagaggccaaggcatgagaatcgcttgaacctgggaggtggaggttgcagtgagctgagatggcaccactgcactccggcctaggcaacgagagcaaaactccaatacaaacaaacaaacaaacacctgtgctaggtcagtctggcacgtaagatgaacatccctaccaatacagagctcaccatctcttatacttaagtgaaaaacatggggaaggggaaaggggaatggctgcttttgatatgttccctgacacatatcttgaatggagacctccctaccaagtgatgaaagtgttgaaaaacttaataacaaatgcttgttgggcaagaatgggattgaggattatcttctctcagaaaggcattgtgaaggaattgagccagatctctctccctactgcaaaaccctattgtagtaaaaaagtcttctttactatcttaataaaacagatattgtgagattc

SEQ ID NO: 190 - protein, 241 aa, Homo sapiens
MAGSPTCLTLIYILWQLTEHLSKPKVTMGLQSNKNGTCVTNLTCCMEHGEEDVIYTWKALGQAANESHNGSILPISWRWGESDMTFICVARNPVSRNFSSPILARKLCEGDCLSPLHRRLCPGAADDPDSSMVLLCLLLVPLLLSLFVLGLFLWFLKRERQEEYIEEKKRVDICRETPNICPHSGENTEYDTIPHTNRTILKEDPANTVYSTVEIPKKMENPHSLLTMPDTPRLFAYENVI

SEQ ID NO: 191 - DNA, 2111 bp, Homo sapiens
cttccagagagcaatatggctggttccccaacatgcctcaccctcatctatatcctttggcagctcacagagcacctgtcaaagcctaaagtcaccatgggtctgcagagcaataagaatggcacctgtgtgaccaatctgacatgctgcatggaacatggggaagaggatgtgatttatacctggaaggccctggggcaagcagccaatgagtcccataatgggtccatcctccccatctcctggagatggggagaaagtgatatgaccttcatctgcgttgccaggaaccctgtcagcagaaacttctcaagccccatccttgccaggaagctctgtgaagagaacaatcctaaaggaagatccagcaaatacggtttactccactgtggaaataccgaaaaagatggaaaatccccactcactgctcacgatgccagacacaccaaggctatttgcctatgagaatgttatctagacagcagtgcactcccctaagtctctgctcaaaaaaaaaacaattctcggcccaaagaaaacaatcagaagaattcactgatttgactagaaacatcaaggaagaatgaagaacgttgacttttttccaggataaattatctctgatgcttctttagatttaagagttcataattccatccactgctgagaaatctcctcaaacccagaaggtttaatcacttcatcccaaaaatgggattgtgaatgtcagcaaaccataaaaaaagtgcttagaagtattcctataaaaatgtaaatgcaaggtcacacatattaatgacagcctgttgtattaatgatggctccaggtcagtgtctggagtttcattccatcccagggcttggatgtcaggattataccaagagtcttgctaccaggagggcaagaagaccaaaacagacagacaagtccagcagaagcagatgcacctgacaaaaatggatgtattaattggctctataaactatgtgcccagcactatgctgagcttacactaattggtcagacatgctgtctgccctcatgaaattggctccaaatgaatgaactactttcatgagcagttgtagcaggcctgaccacagattcccagagggccaggtgtggatccacaggacttgaaggtcaaagttcacaaagatgaagaatcagggtagctgaccatgtttggcagatactataatggagacacagaagtgtgcatggcccaaggacaaggacctccagccaggcttcatttatgcacttgtgctgcaaaagaaaagtctaggttttaaggctgtgccagaacccatcccaataaagagaccgagtctgaagtcacattgtaaatctagtgtaggagacttggagtcaggcagtgagactggtggggcacggggggcagtgggtacttgtaaacctttaaagatggttaattcattcaatagatatttattaagaacctatgcggcccggcatggtggctcacacctgtaatcccagcactttgggaggccaaggtgggtgggtcatctgaggtcaggagttcaagaccagcctggccaacatggtgaaaccccatctctactaaagatacaaaaatttgctgagcgtggtggtgtgcacctgtaatcccagctactcgagaggccaaggcatgagaatcgcttgaacctgggaggtggaggttgcagtgagctgagatggcaccactgcactccggcctaggcaacgagagcaaaactccaatacaaacaaacaaacaaacacctgtgctaggtcagtctggcacgtaagatgaacatccctaccaatacagagctcaccatctcttatacttaagtgaaaaacatggggaaggggaaaggggaatggctgcttttgatatgttccctgacacatatcttgaatggagacctccctaccaagtgatgaaagtgttgaaaaacttaataacaaatgcttgttgggcaagaatgggattgaggattatcttctctcagaaaggcattgtgaaggaattgagccagatctctctccctactgcaaaaccctattgtagtaaaaaagtcttctttactatcttaataaaacagatattgtgagattc

SEQ ID NO: 192 - protein, 149 aa, Homo sapiens
MAGSPTCLTLIYILWQLTEHLSKPKVTMGLQSNKNGTCVTNLTCCMEHGEEDVIYTWKALGQAANESHNGSILPISWRWGESDMTFICVARNPVSRNFSSPILARKLCEENNPKGRSSKYGLLHCGNTEKDGKSPLTAHDARHTKAICL

SEQ ID NO: 193 - DNA, 2215 bp, Homo sapiens
cttccagagagcaatatggctggttccccaacatgcctcaccctcatctatatcctttggcagctcacagagcacctgtcaaagcctaaagtcaccatgggtctgcagagcaataagaatggcacctgtgtgaccaatctgacatgctgcatggaacatggggaagaggatgtgatttatacctggaaggccctggggcaagcagccaatgagtcccataatgggtccatcctccccatctcctggagatggggagaaagtgatatgaccttcatctgcgttgccaggaaccctgtcagcagaaacttctcaagccccatccttgccaggaagctctgtgaagagtacattgaagagaagaagagagtggacatttgtcgggaaactcctaacatatgcccccattctggagagaacacagagtacgacacaatccctcacactaatagaacaatcctaaaggaagatccagcaaatacggtttactccactgtggaaataccgaaaaagatggaaaatccccactcactgctcacgatgccagacacaccaaggctatttgcctatgagaatgttatctagacagcagtgcactcccctaagtctctgctcaaaaaaaaaacaattctcggcccaaagaaaacaatcagaagaattcactgatttgactagaaacatcaaggaagaatgaagaacgttgacttttttccaggataaattatctctgatgcttctttagatttaagagttcataattccatccactgctgagaaatctcctcaaacccagaaggtttaatcacttcatcccaaaaatgggattgtgaatgtcagcaaaccataaaaaaagtgcttagaagtattcctataaaaatgtaaatgcaaggtcacacatattaatgacagcctgttgtattaatgatggctccaggtcagtgtctggagtttcattccatcccagggcttggatgtcaggattataccaagagtcttgctaccaggagggcaagaagaccaaaacagacagacaagtccagcagaagcagatgcacctgacaaaaatggatgtattaattggctctataaactatgtgcccagcactatgctgagcttacactaattggtcagacatgctgtctgccctcatgaaattggctccaaatgaatgaactactttcatgagcagttgtagcaggcctgaccacagattcccagagggccaggtgtggatccacaggacttgaaggtcaaagttcacaaagatgaagaatcagggtagctgaccatgtttggcagatactataatggagacacagaagtgtgcatggcccaaggacaaggacctccagccaggcttcatttatgcacttgtgctgcaaaagaaaagtctaggttttaaggctgtgccagaacccatcccaataaagagaccgagtctgaagtcacattgtaaatctagtgtaggagacttggagtcaggcagtgagactggtggggcacggggggcagtgggtacttgtaaacctttaaagatggttaattcattcaatagatatttattaagaacctatgcggcccggcatggtggctcacacctgtaatcccagcactttgggaggccaaggtgggtgggtcatctgaggtcaggagttcaagaccagcctggccaacatggtgaaaccccatctctactaaagatacaaaaatttgctgagcgtggtggtgtgcacctgtaatcccagctactcgagaggccaaggcatgagaatcgcttgaacctgggaggtggaggttgcagtgagctgagatggcaccactgcactccggcctaggcaacgagagcaaaactccaatacaaacaaacaaacaaacacctgtgctaggtcagtctggcacgtaagatgaacatccctaccaatacagagctcaccatctcttatacttaagtgaaaaacatggggaaggggaaaggggaatggctgcttttgatatgttccctgacacatatcttgaatggagacctccctaccaagtgatgaaagtgttgaaaaacttaataacaaatgcttgttgggcaagaatgggattgaggattatcttctctcagaaaggcattgtgaaggaattgagccagatctctctccctactgcaaaaccctattgtagtaaaaaagtcttctttactatcttaataaaacagatattgtgagattc

SEQ ID NO: 194 - protein, 188 aa, Homo sapiens
MAGSPTCLTLIYILWQLTEHLSKPKVTMGLQSNKNGTCVTNLTCCMEHGEEDVIYTWKALGQAANESHNGSILPISWRWGESDMTFICVARNPVSRNFSSPILARKLCEEYIEEKKRVDICRETPNICPHSGENTEYDTIPHTNRTILKEDPANTVYSTVEIPKKMENPHSLLTMPDTPRLFAYENVI

SEQ ID NO: 195 - DNA, 552 bp, Homo sapiens
atgatcttcctcctgctaatgttgagcctggaattgcagcttcaccagatagcagctttattcacagtgacagtccctaaggaactgtacataatagagcatggcagcaatgtgaccctggaatgcaactttgacactggaagtcatgtgaaccttggagcaataacagccagtttgcaaaaggtggaaaatgatacatccccacaccgtgaaagagccactttgctggaggagcagctgcccctagggaaggcctcgttccacatacctcaagtccaagtgagggacgaaggacagtaccaatgcataatcatctatggggtcgcctgggactacaagtacctgactctgaaagtcaaaggtcagatggaacccaggacccatccaacttggctgcttcacattttcatccccttctgcatcattgctttcattttcatagccacagtgatagccctaagaaaacaactctgtcaaaagctgtattcttcaaaagacacaacaaaaagacctgtcaccacaacaaagagggaagtgaacagtgctatctga

SEQ ID NO: 196 - protein, 183 aa, Homo sapiens
MIFLLLMLSLELQLHQIAALFTVTVPKELYIIEHGSNVTLECNFDTGSHVNLGAITASLQKVENDTSPHRERATLLEEQLPLGKASFHIPQVQVRDEGQYQCIIIYGVAWDYKYLTLKVKGQMEPRTHPTWLLHIFIPFCIIAFIFIATVIALRKQLCQKLYSSKDTTKRPVTTTKREVNSAI

SEQ ID NO: 197 - DNA, 822 bp, Homo sapiens
atgatcttcctcctgctaatgttgagcctggaattgcagcttcaccagatagcagctttattcacagtgacagtccctaaggaactgtacataatagagcatggcagcaatgtgaccctggaatgcaactttgacactggaagtcatgtgaaccttggagcaataacagccagtttgcaaaaggtggaaaatgatacatccccacaccgtgaaagagccactttgctggaggagcagctgcccctagggaaggcctcgttccacatacctcaagtccaagtgagggacgaaggacagtaccaatgcataatcatctatggggtcgcctgggactacaagtacctgactctgaaagtcaaagcttcctacaggaaaataaacactcacatcctaaaggttccagaaacagatgaggtagagctcacctgccaggctacaggttatcctctggcagaagtatcctggccaaacgtcagcgttcctgccaacaccagccactccaggacccctgaaggcctctaccaggtcaccagtgttctgcgcctaaagccaccccctggcagaaacttcagctgtgtgttctggaatactcacgtgagggaacttactttggccagcattgaccttcaaagtcagatggaacccaggacccatccaacttggctgcttcacattttcatccccttctgcatcattgctttcattttcatagccacagtgatagccctaagaaaacaactctgtcaaaagctgtattcttcaaaagacacaacaaaaagacctgtcaccacaacaaagagggaagtgaacagtgctatctga

SEQ ID NO: 198 - protein, 273 aa, Homo sapiens
MIFLLLMLSLELQLHQIAALFTVTVPKELYIIEHGSNVTLECNFDTGSHVNLGAITASLQKVENDTSPHRERATLLEEQLPLGKASFHIPQVQVRDEGQYQCIIIYGVAWDYKYLTLKVKASYRKINTHILKVPETDEVELTCQATGYPLAEVSWPNVSVPANTSHSRTPEGLYQVTSVLRLKPPPGRNFSCVFWNTHVRELTLASIDLQSQMEPRTHPTWLLHIFIPFCIIAFIFIATVIALRKQLCQKLYSSKDTTKRPVTTTKREVNSAI

SEQ ID NO: 199 - DNA, 753 bp, Homo sapiens
atggagaagggccctgtgcgggcaccggcggagaagccgcggggcgccaggtgcagcaatgggttccccgagcgggatccgccgcggcccgggcccagcaggccggcggagaagcccccgcggcccgaggccaagagcgcgcagcccgcggacggctggaagggcgagcggccccgcagcgaggaggataacgagctgaacctccctaacctggcagccgcctactcgtccatcctgagctcgctgggcgagaacccccagcggcaagggctgctcaagacgccctggagggcggcctcggccatgcagttcttcaccaagggctaccaggagaccatctcagatgtcctaaacgatgctatatttgatgaagatcatgatgagatggtgattgtgaaggacatagacatgttttccatgtgtgagcatcacttggttccatttgttggaaaggtccatattggttatcttcctaacaagcaagtccttggcctcagcaaacttgcgaggattgtagaaatctatagtagaagactacaagttcaggagcgccttacaaaacaaattgctgtagcaatcacggaagccttgcggcctgctggagtcggggtagtggttgaagcaacacacatgtgtatggtaatgcgaggtgtacagaaaatgaacagcaaaactgtgaccagcacaatgttgggtgtgttccgggaggatccaaagactcgggaagagttcctgactctcattaggagctga

SEQ ID NO: 200 - protein, 250 aa, Homo sapiens
MEKGPVRAPAEKPRGARCSNGFPERDPPRPGPSRPAEKPPRPEAKSAQPADGWKGERPRSEEDNELNLPNLAAAYSSILSSLGENPQRQGLLKTPWRAASAMQFFTKGYQETISDVLNDAIFDEDHDEMVIVKDIDMFSMCEHHLVPFVGKVHIGYLPNKQVLGLSKLARIVEIYSRRLQVQERLTKQIAVAITEALRPAGVGVVVEATHMCMVMRGVQKMNSKTVTSTMLGVFREDPKTREEFLTLIRS

SEQ ID NO: 201 - DNA, 642 bp, Homo sapiens
atggagaagggccctgtgcgggcaccggcggagaagccgcggggcgccaggtgcagcaatgggttccccgagcgggatccgccgcggcccgggcccagcaggccggcggagaagcccccgcggcccgaggccaagagcgcgcagcccgcggacggctggaagggcgagcggccccgcagcgaggaggataacgagctgaacctccctaacctggcagccgcctactcgtccatcctgagctcgctgggcgagaacccccagcggcaagggctgctcaagacgccctggagggcggcctcggccatgcagttcttcaccaagggctaccaggagaccatctcagatgtcctaaacgatgctatatttgatgaagatcatgatgagatggtgattgtgaaggacatagacatgttttccatgtgtgagcatcacttggttccatttgttggaaaggtccatattggttatcttcctaacaagcaagtccttggcctcagcaaacttgcgaggattgtagaaatctatagtagaagactacaagttcaggagcgccttacaaaacaaattgctgtagcaatcacggaagccttgcggcctgctggagtcggggtagtggttgaagcaacgtctgcagaaccatag

SEQ ID NO: 202 - protein, 213 aa, Homo sapiens
MEKGPVRAPAEKPRGARCSNGFPERDPPRPGPSRPAEKPPRPEAKSAQPADGWKGERPRSEEDNELNLPNLAAAYSSILSSLGENPQRQGLLKTPWRAASAMQFFTKGYQETISDVLNDAIFDEDHDEMVIVKDIDMFSMCEHHLVPFVGKVHIGYLPNKQVLGLSKLARIVEIYSRRLQVQERLTKQIAVAITEALRPAGVGVVVEATSAEP

SEQ ID NO: 203 - DNA, 702 bp, Homo sapiens
atggagaagggccctgtgcgggcaccggcggagaagccgcggggcgccaggtgcagcaatgggttccccgagcgggatccgccgcggcccgggcccagcaggccggcggagaagcccccgcggcccgaggccaagagcgcgcagcccgcggacggctggaagggcgagcggccccgcagcgaggaggataacgagctgaacctccctaacctggcagccgcctactcgtccatcctgagctcgctgggcgagaacccccagcggcaagggctgctcaagacgccctggagggcggcctcggccatgcagttcttcaccaagggctaccaggagaccatctcagatgtcctaaacgatgctatatttgatgaagatcatgatgagatggtgattgtgaaggacatagacatgttttccatgtgtgagcatcacttggttccatttgttggaaaggtccatattggttatcttcctaacaagcaagtccttggcctcagcaaacttgcgaggattgtagaaatctatagtagaagactacaagttcaggagcgccttacaaaacaaattgctgtagcaatcacggaagccttgcggcctgctggagtcggggtagtggttgaagcaacgaagtcaaataaatataataaagggttgagccctctactttcttcttgccacctttttgtggcaatattaaagtga

SEQ ID NO: 204 - protein, 233 aa, Homo sapiens
MEKGPVRAPAEKPRGARCSNGFPERDPPRPGPSRPAEKPPRPEAKSAQPADGWKGERPRSEEDNELNLPNLAAAYSSILSSLGENPQRQGLLKTPWRAASAMQFFTKGYQETISDVLNDAIFDEDHDEMVIVKDIDMFSMCEHHLVPFVGKVHIGYLPNKQVLGLSKLARIVEIYSRRLQVQERLTKQIAVAITEALRPAGVGVVVEATKSNKYNKGLSPLLSSCHLFVAILK

SEQ ID NO: 205 - DNA, 753 bp, Homo sapiens; identical to SEQ ID NO: 199

SEQ ID NO: 206 - protein, 250 aa, Homo sapiens; identical to SEQ ID NO: 200

SEQ ID NO: 207 - DNA, 1293 bp, Homo sapiens
atgaagccaagtctgctgtgccggcccctgtcctgcttccttatgctgctgccctggcctctcgccaccctgacatcaacaaccctttggcagtgcccacctggggaggagcccgacctggacccagggcagggcacattatgcaggccctgccccccaggcaccttctcagctgcatggggctccagcccatgccagccccatgcccgttgcagcctttggaggaggctggaggcccaggtgggcatggcaactcgagatacactctgtggagactgctggcctgggtggtttgggccttggggggttccccgcgttccatgtcaaccatgttcctgggcacctctgggtactcatggctgtgatgagtgggggcggcgggcccgacgtggcgtggaggtggcagcaggggccagcagcggtggtgagacacggcagcctgggaacggcacccgggcaggtggcccagaggagacagccgcccagtacgcggtcatcgccatcgtccctgtcttctgcctcatggggctgttgggcatcctggtgtgcaacctcctcaagcggaagggctaccactgcacggcgcacaaggaggtcgggcccggccctggaggtggaggcagtggaatcaaccctgcctaccggactgaggatgccaatgaggacaccattggggtcctggtgcgcttgatcacagagaagaaagagaatgctgcggccctggaggagctgctgaaagagtaccacagcaaacagctggtgcagacgagccacaggcctgtgtccaagctgccgccagcgcccccgaacgtgccacacatctgcccgcaccgccaccatctccacaccgtgcagggcctggcctcgctctctggcccctgctgctcccgctgtagccagaagaagtggcccgaggtgctgctgtcccctgaggctgtagccgccactactcctgttcccagccttctgcctaacccgaccagggttcccaaggccggggccaaggcagggcgtcagggcgagatcaccatcttgtctgtgggcaggttccgcgtggctcgaattcctgagcagcggacaagttcaatggtgtctgaggtgaagaccatcacggaggctgggccctcgtggggtgatctccctgactccccacagcctggcctcccccctgagcagcaggccctgctaggaagtggcggaagccgtacaaagtggctgaagcccccagcagagaacaaggccgaggagaaccgctatgtggtccggctaagtgagagcaacctggtcatctga

SEQ ID NO: 208 - protein, 430 aa, Homo sapiens
MKPSLLCRPLSCFLMLLPWPLATLTSTTLWQCPPGEEPDLDPGQGTLCRPCPPGTFSAAWGSSPCQPHARCSLWRRLEAQVGMATRDTLCGDCWPGWFGPWGVPRVPCQPCSWAPLGTHGCDEWGRRARRGVEVAAGASSGGETRQPGNGTRAGGPEETAAQYAVIAIVPVFCLMGLLGILVCNLLKRKGYHCTAHKEVGPGPGGGGSGINPAYRTEDANEDTIGVLVRLITEKKENAAALEELLKEYHSKQLVQTSHRPVSKLPPAPPNVPHICPHRHHLHTVQGLASLSGPCCSRCSQKKWPEVLLSPEAVAATTPVPSLLPNPTRVPKAGAKAGRQGEITILSVGRFRVARIPEQRTSSMVSEVKTITEAGPSWGDLPDSPQPGLPPEQQALLGSGGSRTKWLKPPAENKAEENRYVVRLSESNLVI

SEQ ID NO: 209 - DNA, 1293 bp, Homo sapiens; identical to SEQ ID NO: 207

SEQ ID NO: 210 - protein, 430 aa, Homo sapiens; identical to SEQ ID NO: 208

SEQ ID NO: 211 - DNA, 1272 bp, Homo sapiens
atggcgggcaagcggtccggctggagccgggcggctctcctccagctccttctcggcgtgaacctggtggtgatgccgcccacccgggcccggagtctgcgcttcgttaccttgctgtaccgccatggagaccgttcaccagtgaagacatatcccaaggacccctatcaggaagaagaatggccccaggggtttggtcagttaaccaaggaggggatgctacagcactgggaactgggccaggccctgcggcagcgctatcacggcttcctaaacacctcttatcaccggcaagaggtttatgtgcgaagcacagactttgaccggactctcatgagtgctgaggccaacctggctggactcttccctcccaacgggatgcagcgcttcaacccgaacatctcgtggcagcctattcctgtgcacactgtgcccatcactgaggacaggctgctgaagttcccgttgggcccatgtccccgttatgagcagctgcagaacgagacccggcagacaccagagtatcagaatgagagttctcggaatgcacaatttctggacatggtggccaacgagacagggcttacagacctgacactggagaccgtctggaatgtctatgacacactcttctgtgagcaaacgcacgggctgcgcctgccgccctgggcctcaccccaaaccatgcagcgtctcagccggctaaaggacttcagcttccgcttcctcttcggaatctaccagcaggcggagaaggcccggcttcaggggggagtcctgctggctcagataaggaagaacctgaccctaatggcgaccacctcccagctccccaagctgctggtttactctgcgcacgacactaccctggttgccctgcaaatggcactggatgtctacaatggtgaacaagccccctacgcctcctgccacatatttgaactgtaccaggaagattctgggaatttctcagtggagatgtactttcggaacgagagtgacaaggccccctggccgctcagcctgcctggctgccctcaccgctgcccactgcaggacttccttcgcctcacagagcccgtcgtgcccaaggattggcagcaggagtgccagctggcaagcggtcctgcagacacagaggtgattgtggccttggctgtatgtggctccatcctcttcctcctcatagtgctgctcctcaccgtcctcttccggatgcaggcccagcctcctggctaccgccacgtcgcagatggggaggaccacgcctga

SEQ ID NO: 212 - protein, 423 aa, Homo sapiens
MAGKRSGWSRAALLQLLLGVNLVVMPPTRARSLRFVTLLYRHGDRSPVKTYPKDPYQEEEWPQGFGQLTKEGMLQHWELGQALRQRYHGFLNTSYHRQEVYVRSTDFDRTLMSAEANLAGLFPPNGMQRFNPNISWQPIPVHTVPITEDRLLKFPLGPCPRYEQLQNETRQTPEYQNESSRNAQFLDMVANETGLTDLTLETVWNVYDTLFCEQTHGLRLPPWASPQTMQRLSRLKDFSFRFLFGIYQQAEKARLQGGVLLAQIRKNLTLMATTSQLPKLLVYSAHDTTLVALQMALDVYNGEQAPYASCHIFELYQEDSGNFSVEMYFRNESDKAPWPLSLPGCPHRCPLQDFLRLTEPVVPKDWQQECQLASGPADTEVIVALAVCGSILFLLIVLLLTVLFRMQAQPPGYRHVADGEDHA

SEQ ID NO: 213 - DNA, 2076 bp, Homo sapiens
atgcagccgccgccccgaaaagtgaagccggcccaggaggtgaagcttcgcttcctggaacagctgagcatccttcagacctggcagcagagggaggcggatctgctggaggacatcagatcctacagcaagcagagggcagccattgaacgggagtatgggcaggcactccagaaactggctggcccattcctgaagagggaagggcaccggagcggtgagatggacagcaggaggggcaggacagtgttcggtgcctggcgctgcctgctggatgccaccgtggctgggggccaaacccgactccaggcgtctgaccgataccgtgacctagcagggggtacagggcggagcgccaaggagcaggtgcttaggaagggaacagagaacctccagagggcgcaggctgaggtgctgcagtctgtccgggagctgagccgaagtcggaagctgtatgggcagcgggaacgtgtgtgggccttggcacaggagaaggcggctgatgtccaggccaggctaaaccgaagtgaccatgggatcttccactctcggaccagtctccagaaactgagcaccaagctgtccgcccagtcagcccagtactcccagcagctgcaagcagcccgcaatgagtacctgcttaacttggtggctaccaatgcccacctcgaccattactaccaggaggaactgccagctctgctcaaggccctggtcagtgagctgtcagagcacttgagggaccccctgacctccctgagccacactgagctggaagccgcagaggtcatcctggagcatgcccaccgcggggagcagacaacctcccaggtaagctgggagcaagacctgaagctgtttcttcaggagcctggtgtattttcccccaccccacctcagcagtttcagccagcagggactgatcaggtgtgtgtcctggagtggggagcagaaggcgtggctggcaagagtggcctggagaaagaggttcagcgcttgaccagccgagctgcccgtgactacaagatccagaaccatgggcatcgggtactgcaacgactggagcagaggcggcagcaggcttcagagcgggaggctccaagcatagaacagaggttacaggaagtgcgagagagcatccgccgggcacaggtgagccaggtgaagggggctgcccggctggccctgctgcagggggctggcttagatgtggagcgctggctgaagccagccatgacccaggcccaggatgaggtggagcaggagcggcggctcagtgaggctcggctgtcccagagggacctctctccaaccgctgaggatgctgagctttctgactttgaggaatgtgaggagacgggagagctctttgaggagcctgccccccaagccctggccacgagggccctcccctgccctgcacacgtggtatttcgctatcaggcagggcgtgaggatgagctgacaatcacggagggtgagtggctggaggtcatagaggagggagatgctgacgaatgggtcaaggctcggaaccagcacggcgaggtaggctttgtccctgagcgatatctcaacttcccggacctctccctcccagagagcagccaagacagtgacaatccctgcggggcagagcccacagcattcctggcacaggccctgtacagctacaccggacagagtgcagaggagctgagcttccctgagggggcactcatccgtctgctgccccgggcccaagatggagtagatgacggcttctggaggggagaatttgggggccgtgttggggtcttcccctccctgctggtggaagagctgcttggccccccagggccacctgaactctctgaccctgaacagatgctgccgtccccttctcctcccagcttctccccacctgcacctacctctgtgttggatgggccccctgcacctgtcctgcctggggacaaagccctggacttccctgggttcctggacatgatggcacctcgactcaggccgatgcgtccaccacctcccccgccggctaaagccccggatcctggccacccagatcccctcacctga

SEQ ID NO: 214 - protein, 691 aa, Homo sapiens
MQPPPRKVKPAQEVKLRFLEQLSILQTWQQREADLLEDIRSYSKQRAAIEREYGQALQKLAGPFLKREGHRSGEMDSRRGRTVFGAWRCLLDATVAGGQTRLQASDRYRDLAGGTGRSAKEQVLRKGTENLQRAQAEVLQSVRELSRSRKLYGQRERVWALAQEKAADVQARLNRSDHGIFHSRTSLQKLSTKLSAQSAQYSQQLQAARNEYLLNLVATNAHLDHYYQEELPALLKALVSELSEHLRDPLTSLSHTELEAAEVILEHAHRGEQTTSQVSWEQDLKLFLQEPGVFSPTPPQQFQPAGTDQVCVLEWGAEGVAGKSGLEKEVQRLTSRAARDYKIQNHGHRVLQRLEQRRQQASEREAPSIEQRLQEVRESIRRAQVSQVKGAARLALLQGAGLDVERWLKPAMTQAQDEVEQERRLSEARLSQRDLSPTAEDAELSDFEECEETGELFEEPAPQALATRALPCPAHVVFRYQAGREDELTITEGEWLEVIEEGDADEWVKARNQHGEVGFVPERYLNFPDLSLPESSQDSDNPCGAEPTAFLAQALYSYTGQSAEELSFPEGALIRLLPRAQDGVDDGFWRGEFGGRVGVFPSLLVEELLGPPGPPELSDPEQMLPSPSPPSFSPPAPTSVLDGPPAPVLPGDKALDFPGFLDMMAPRLRPMRPPPPPPAKAPDPGHPDPLT

SEQ ID NO: 215 - DNA, 2073 bp, Homo sapiens
atgcagccgccgccccgaaaagtgaagccggcccaggaggtgaagcttcgcttcctggaacagctgagcatccttcagacctggcagcagagggaggcggatctgctggaggacatcagatcctacagcaagcagagggcagccattgaacgggagtatgggcaggcactccagaaactggctggcccattcctgaagagggaagggcaccggagcggtgagatggacagcaggggcaggacagtgttcggtgcctggcgctgcctgctggatgccaccgtggctgggggccaaacccgactccaggcgtctgaccgataccgtgacctagcagggggtacagggcggagcgccaaggagcaggtgcttaggaagggaacagagaacctccagagggcgcaggctgaggtgctgcagtctgtccgggagctgagccgaagtcggaagctgtatgggcagcgggaacgtgtgtgggccttggcacaggagaaggcggctgatgtccaggccaggctaaaccgaagtgaccatgggatcttccactctcggaccagtctccagaaactgagcaccaagctgtccgcccagtcagcccagtactcccagcagctgcaagcagcccgcaatgagtacctgcttaacttggtggctaccaatgcccacctcgaccattactaccaggaggaactgccagctctgctcaaggccctggtcagtgagctgtcagagcacttgagggaccccctgacctccctgagccacactgagctggaagccgcagaggtcatcctggagcatgcccaccgcggggagcagacaacctcccaggtaagctgggagcaagacctgaagctgtttcttcaggagcctggtgtattttcccccaccccacctcagcagtttcagccagcagggactgatcaggtgtgtgtcctggagtggggagcagaaggcgtggctggcaagagtggcctggagaaagaggttcagcgcttgaccagccgagctgcccgtgactacaagatccagaaccatgggcatcgggtactgcaacgactggagcagaggcggcagcaggcttcagagcgggaggctccaagcatagaacagaggttacaggaagtgcgagagagcatccgccgggcacaggtgagccaggtgaagggggctgcccggctggccctgctgcagggggctggcttagatgtggagcgctggctgaagccagccatgacccaggcccaggatgaggtggagcaggagcggcggctcagtgaggctcggctgtcccagagggacctctctccaaccgctgaggatgctgagctttctgactttgaggaatgtgaggagacgggagagctctttgaggagcctgccccccaagccctggccacgagggccctcccctgccctgcacacgtggtatttcgctatcaggcagggcgtgaggatgagctgacaatcacggagggtgagtggctggaggtcatagaggagggagatgctgacgaatgggtcaaggctcggaaccagcacggcgaggtaggctttgtccctgagcgatatctcaacttcccggacctctccctcccagagagcagccaagacagtgacaatccctgcggggcagagcccacagcattcctggcacaggccctgtacagctacaccggacagagtgcagaggagctgagcttccctgagggggcactcatccgtctgctgccccgggcccaagatggagtagatgacggcttctggaggggagaatttgggggccgtgttggggtcttcccctccctgctggtggaagagctgcttggccccccagggccacctgaactctctgaccctgaacagatgctgccgtccccttctcctcccagcttctccccacctgcacctacctctgtgttggatgggccccctgcacctgtcctgcctggggacaaagccctggacttccctgggttcctggacatgatggcacctcgactcaggccgatgcgtccaccacctcccccgccggctaaagccccggatcctggccacccagatcccctcacctga

SEQ ID NO: 216 - protein, 690 aa, Homo sapiens
MQPPPRKVKPAQEVKLRFLEQLSILQTWQQREADLLEDIRSYSKQRAAIEREYGQALQKLAGPFLKREGHRSGEMDSRGRTVFGAWRCLLDATVAGGQTRLQASDRYRDLAGGTGRSAKEQVLRKGTENLQRAQAEVLQSVRELSRSRKLYGQRERVWALAQEKAADVQARLNRSDHGIFHSRTSLQKLSTKLSAQSAQYSQQLQAARNEYLLNLVATNAHLDHYYQEELPALLKALVSELSEHLRDPLTSLSHTELEAAEVILEHAHRGEQTTSQVSWEQDLKLFLQEPGVFSPTPPQQFQPAGTDQVCVLEWGAEGVAGKSGLEKEVQRLTSRAARDYKIQNHGHRVLQRLEQRRQQASEREAPSIEQRLQEVRESIRRAQVSQVKGAARLALLQGAGLDVERWLKPAMTQAQDEVEQERRLSEARLSQRDLSPTAEDAELSDFEECEETGELFEEPAPQALATRALPCPAHVVFRYQAGREDELTITEGEWLEVIEEGDADEWVKARNQHGEVGFVPERYLNFPDLSLPESSQDSDNPCGAEPTAFLAQALYSYTGQSAEELSFPEGALIRLLPRAQDGVDDGFWRGEFGGRVGVFPSLLVEELLGPPGPPELSDPEQMLPSPSPPSFSPPAPTSVLDGPPAPVLPGDKALDFPGFLDMMAPRLRPMRPPPPPPAKAPDPGHPDPLT

SEQ ID NO: 217 - DNA, 3111 bp, Homo sapiens
gtggtcagcacaggggccggcaccacggggttatcgaagcagctgtcaagatgctggggtccctggtgttgaggagaaaagcactggcgccacggctactcctccggctgctcaggtccccaacgctccggggccatggaggtgcttccggccggaatgtgactactgggagtctcggggagccgcagtggctgagggtagccaccggggggcgccctggaacatcgccggccttgttctccggacgtggggcagccaccggggggcgccagggaggacgcttcgataccaaatgcctcgcggctgccacttggggacgccttcctggtcccgaagaaacactcccaggacaggacagctggaacggggtccccagcagggccggactgggcatgtgcgccctggccgcagcgctggtggttcattgctacagcaagagtccgtccaacaaggatgcagccctgttggaagctgcccgtgccaacaatatgcaagaagtcagcaggctgttgtcagaaggtgcagatgtcaatgcaaagcacagacttggctggacagcactcatggtggcagccatcaaccgaaacaacagtgtggtacaggtcctgcttgctgctggggctgatccaaaccttggagatgatttcagcagtgtttacaagactgccaaggaacagggaatccattctttggaagatgggggacaggacggtgcaagccggcacatcacaaaccagtggacaagtgccctggagttcaggagatggctaggactccccgctggcgtcctgatcacccgagaggatgacttcaacaacaggctgaacaaccgcgccagtttcaagggctgcacggccttgcactatgctgttcttgctgatgactaccgcactgtcaaggagctgcttgatggaggagccaaccccctgcagaggaatgaaatgggacacacacccttggattatgcccgagaaggggaagtgatgaagcttctgaggacttctgaagccaagtaccaagagaagcagcggaagcgtgaggctgaggagcggcgccgcttccccctggagcagcgactaaaggagcacatcattggccaggagagcgccatcgccacagtgggtgctgcgatccggaggaaggagaatggctggtacgatgaagaacaccctctggtcttcctcttcttgggatcatctggaataggaaaaacagagctggccaagcagacagccaaatatatgcacaaagatgctaaaaagggcttcatcaggctggacatgtccgagttccaggagcgacacgaggtggccaagtttattgggtctccaccaggctacgttggccatgaggagggtggccagctgaccaagaagttgaagcagtgccccaatgctgtggtgctctttgatgaagtagacaaggcccatccagatgtgctcaccatcatgctgcagctgtttgatgagggccggctgacagatggaaaagggaagaccattgattgcaaggacgccatcttcatcatgacctccaatgtggccagcgacgagatcgcacagcacgcgctgcagctgaggcaggaagctttggagatgagccgtaaccgtattgccgaaaacctgggggatgtccagataagtgacaagatcaccatctcaaagaacttcaaggagaatgtgattcgccctatcctgaaagctcacttccggagggatgagtttctgggacggatcaatgagatcgtctacttcctccccttctgccactcggagctcatccaactcgtcaacaaggaactaaacttctgggccaagagagccaagcaaaggcacaacatcacgctgctctgggaccgcgaggtggcagatgtgctggtcgacggctacaatgtgcactatggcgcccgctccatcaaacatgaggtagaacgccgtgtggtgaaccagctggcagcagcctatgagcaggacctgctgccagggggctgtactttgcgcatcacggtggaggactcagacaagcagctactcaaaagcccagaactgccctcaccccaggctgagaagcgcctccccaagctgcgtctggagatcatcgacaaggacagcaagactcgcagactggacatccgggcaccactgcaccctgagaaggtgtgcaacaccatctagcagccacctgcctgctcctatgtgccctcaccatccaataaaggccccttggctgtggcatggcaactgacttaccttcccctcatgccgctcccatctctacccagtctcaggcctgcttacctcctcacagcccatgaagaccccttctcagccccaaaacctgaaggaggaatttcgccctactctggcccctttgttgtgggcccataacctgctaacaagccttcaggagaggagctgcctttccacccccttcaaggcaaggagggatggaggtcccttatttccttcagaatgatccccatcccccatagtcgccagactttctcatgttcccaggaagctcagaagtatggcagctaagaacacagctggctggaagaagacagggaccagactgaactgccaccctctgctagtcctcatgcaactcagtccccagaatggctccactgggagtggaggaagagctcagaggcccaggtgcagatagttctgcaatttagtctgtagcctcctcgttccctaccctaaaattctaaggggaagggacccatagaggcttgcctgtttccgctactatattatgcccagtgttcctcctcaccccacgtcctggggtcaggccagaccatgtttcgtcagccttggggactaggccagtgttgggcacctccaggaggaggcctgactggttcattaccctcccctactcagactgagcagcagtcccagataaccaagcaagctcagctctgtgggggcctccttcaaaagaccaacatcgcagacattaggaagctgtaggaagagagatcatgggtttgacctctgcccacatggccatggagtcagcctcagccctgtctgtactgctcgtccagctaaacgagcctggaataaacatgcagtttattcagtctgcatgttagtc

SEQ ID NO: 218 - protein, 707 aa, Homo sapiens
MLGSLVLRRKALAPRLLLRLLRSPTLRGHGGASGRNVTTGSLGEPQWLRVATGGRPGTSPALFSGRGAATGGRQGGRFDTKCLAAATWGRLPGPEETLPGQDSWNGVPSRAGLGMCALAAALVVHCYSKSPSNKDAALLEAARANNMQEVSRLLSEGADVNAKHRLGWTALMVAAINRNNSVVQVLLAAGADPNLGDDFSSVYKTAKEQGIHSLEDGGQDGASRHITNQWTSALEFRRWLGLPAGVLITREDDFNNRLNNRASFKGCTALHYAVLADDYRTVKELLDGGANPLQRNEMGHTPLDYAREGEVMKLLRTSEAKYQEKQRKREAEERRRFPLEQRLKEHIIGQESAIATVGAAIRRKENGWYDEEHPLVFLFLGSSGIGKTELAKQTAKYMHKDAKKGFIRLDMSEFQERHEVAKFIGSPPGYVGHEEGGQLTKKLKQCPNAVVLFDEVDKAHPDVLTIMLQLFDEGRLTDGKGKTIDCKDAIFIMTSNVASDEIAQHALQLRQEALEMSRNRIAENLGDVQISDKITISKNFKENVIRPILKAHFRRDEFLGRINEIVYFLPFCHSELIQLVNKELNFWAKRAKQRHNITLLWDREVADVLVDGYNVHYGARSIKHEVERRVVNQLAAAYEQDLLPGGCTLRITVEDSDKQLLKSPELPSPQAEKRLPKLRLEIIDKDSKTRRLDIRAPLHPEKVCNTI

SEQ ID NO: 219 - DNA, 2151 bp, Homo sapiens
gacgtggtcagcacaggggccggcaccacggggttatcgaagcagctgtcaagatgctggggtccctggtgttgaggagaaaagcactggcgccacggctactcctccggctgctcaggtccccaacgctccggggccatggaggtgcttccggccggaatgtgactactgggagtctcggggagccgcagtggctgagggtagccaccggggggcgccctggaacatcgccggccttgttctccggacgtggggcagccaccggggggcgccagggaggacgcttcgataccaaatgcctcgcggctgccacttggggacgccttcctggtcccgaagaaacactcccaggacaggacagctggaacggggtccccagcagggccggactgggcatgtgcgccctggccgcagcgctggtggttcattgctacagcaagagtccgtccaacaaggatgcagccctgttggaagctgcccgtgccaacaatatgcaagaagtcagcaggctgttgtcagaaggtgcagatgtcaatgcaaagcacagacttggctggacagcactcatggtggcagccatcaaccgaaacaacagtgtggtacaggtcctgcttgctgctggggctgatccaaaccttggagatgatttcagcagtgtttacaagactgccaaggaacagggaatccattctttggaagtcctgatcacccgagaggatgacttcaacaacaggctgaacaaccgcgccagtttcaagggctgcacggccttgcactatgctgttcttgctgatgactaccgcactgtcaaggagctgcttgatggaggagccaaccccctgcagaggaatgaaatgggacacacacccttggattatgcccgagaaggggaagtgatgaagcttctgaggacttctgaagccaagtaccaagagaagcagcggaagcgtgaggctgaggagcggcgccgcttccccctggagcagcgactaaaggagcacatcattggccaggagagcgccatcgccacagtgggtgctgcgatccggaggaaggagaatggctggtacgatgaagaacaccctctggtcttcctcttcttgggatcatctggaataggaaaaacagagctggccaagcagacagccaaatatatgcacaaagatgctaaaaagggcttcatcaggctggacatgtccgagttccaggagcgacacgaggtggccaagtttattgggtctccaccaggctacgttggccatgaggagggtggccagctgaccaagaagttgaagcagtgccccaatgctgtggtgctctttgatgaagtagacaaggcccatccagatgtgctcaccatcatgctgcagctgtttgatgagggccggctgacagatggaaaagggaagaccattgattgcaaggacgccatcttcatcatgacctccaatgtggccagcgacgagatcgcacagcacgcgctgcagctgaggcaggaagctttggagatgagccgtaaccgtattgccgaaaacctgggggatgtccagataagtgacaagatcaccatctcaaagaacttcaaggagaatgtgattcgccctatcctgaaagctcacttccggagggatgagtttctgggacggatcaatgagatcgtctacttcctccccttctgccactcggagctcatccaactcgtcaacaaggaactaaacttctgggccaagagagccaagcaaaggcacaacatcacgctgctctgggaccgcgaggtggcagatgtgctggtcgacggctacaatgtgcactatggcgcccgctccatcaaacatgaggtagaacgccgtgtggtgaaccagctggcagcagcctatgagcaggacctgctgccagggggctgtactttgcgcatcacggtggaggactcagacaagcagctactcaaaagcccagaactgccctcaccccaggctgagaagcgcctccccaagctgcgtctggagatcatcgacaaggacagcaagactcgcagactggacatccgggcaccactgcaccctgagaaggtgtgcaacaccatctagcagccacctgcctgctcctatgtgccctcaccatccaataaaggccccttggctgtggcatggc

SEQ ID NO: 220 - protein, 677 aa, Homo sapiens
MLGSLVLRRKALAPRLLLRLLRSPTLRGHGGASGRNVTTGSLGEPQWLRVATGGRPGTSPALFSGRGAATGGRQGGRFDTKCLAAATWGRLPGPEETLPGQDSWNGVPSRAGLGMCALAAALVVHCYSKSPSNKDAALLEAARANNMQEVSRLLSEGADVNAKHRLGWTALMVAAINRNNSVVQVLLAAGADPNLGDDFSSVYKTAKEQGIHSLEVLITREDDFNNRLNNRASFKGCTALHYAVLADDYRTVKELLDGGANPLQRNEMGHTPLDYAREGEVMKLLRTSEAKYQEKQRKREAEERRRFPLEQRLKEHIIGQESAIATVGAAIRRKENGWYDEEHPLVFLFLGSSGIGKTELAKQTAKYMHKDAKKGFIRLDMSEFQERHEVAKFIGSPPGYVGHEEGGQLTKKLKQCPNAVVLFDEVDKAHPDVLTIMLQLFDEGRLTDGKGKTIDCKDAIFIMTSNVASDEIAQHALQLRQEALEMSRNRIAENLGDVQISDKITISKNFKENVIRPILKAHFRRDEFLGRINEIVYFLPFCHSELIQLVNKELNFWAKRAKQRHNITLLWDREVADVLVDGYNVHYGARSIKHEVERRVVNQLAAAYEQDLLPGGCTLRITVEDSDKQLLKSPELPSPQAEKRLPKLRLEIIDKDSKTRRLDIRAPLHPEKVCNTI

SEQ ID NO: 221 - DNA, 2348 bp, Homo sapiens
gacgtggtcagcacaggggccggcaccacggggttatcgaagcagctgtcaagatgctggggtccctggtgttgaggagaaaagcactggcgccacggctactcctccggctgctcaggtccccaacgctccggggccatggaggtgcttccggccggaatgtgactactgggagtctcggggagccgcagtggctgagggtagccaccggggggcgccctggaacatcgccggccttgttctccggacgtggggcagccaccggggggcgccagggaggacgcttcgataccaaatgcctcgcggctgccacttggggacgccttcctggtcccgaagaaacactcccaggacaggacagctggaacggggtccccagcagggccggactgggcatgtgcgccctggccgcagcgctggtggttcattgctacagcaagagtccgtccaacaaggatgcagccctgttggaagctgcccgtgccaacaatatgcaagaagtcagcagccccaagagactgcaaagaatgatgctcagtcaagaagctgggcagggctgaatgctggagtctcactgaagaacaccaagatttcctcctctgaatggcccctcaggctgttgtcagaaggtgcagatgtcaatgcaaagcacagacttggctggacagcactcatggtggcagccatcaaccgaaacaacagtgtggtacaggtcctgcttgctgctggggctgatccaaaccttggagatgatttcagcagtgtttacaagactgccaaggaacagggaatccattctttggaagatgggggacaggacggtgcaagccggcacatcacaaaccagtggacaagtgccctggagttcaggagatggctaggactccccgctggcgtcctgatcacccgagaggatgacttcaacaacaggctgaacaaccgcgccagtttcaagggctgcacggccttgcactatgctgttcttgctgatgactaccgcactgtcaaggagctgcttgatggaggagccaaccccctgcagaggaatgaaatgggacacacacccttggattatgcccgagaaggggaagtgatgaagcttctgaggacttctgaagccaagtaccaagagaagcagcggaagcgtgaggctgaggagcggcgccgcttccccctggagcagcgactaaaggagcacatcattggccaggagagcgccatcgccacagtgggtgctgcgatccggaggaaggagaatggctggtacgatgaagaacaccctctggtcttcctcttcttgggatcatctggaataggaaaaacagagctggccaagcagacagccaaatatatgcacaaagatgctaaaaagggcttcatcaggctggacatgtccgagttccaggagcgacacgaggtggccaagtttattgggtctccaccaggctacgttggccatgaggagggtggccagctgaccaagaagttgaagcagtgccccaatgctgtggtgctctttgatgaagtagacaaggcccatccagatgtgctcaccatcatgctgcagctgtttgatgagggccggctgacagatggaaaagggaagaccattgattgcaaggacgccatcttcatcatgacctccaatgtggccagcgacgagatcgcacagcacgcgctgcagctgaggcaggaagctttggagatgagccgtaaccgtattgccgaaaacctgggggatgtccagataagtgacaagatcaccatctcaaagaacttcaaggagaatgtgattcgccctatcctgaaagctcacttccggagggatgagtttctgggacggatcaatgagatcgtctacttcctccccttctgccactcggagctcatccaactcgtcaacaaggaactaaacttctgggccaagagagccaagcaaaggcacaacatcacgctgctctgggaccgcgaggtggcagatgtgctggtcgacggctacaatgtgcactatggcgcccgctccatcaaacatgaggtagaacgccgtgtggtgaaccagctggcagcagcctatgagcaggacctgctgccagggggctgtactttgcgcatcacggtggaggactcagacaagcagctactcaaaagcccagaactgccctcaccccaggctgagaagcgcctccccaagctgcgtctggagatcatcgacaaggacagcaagactcgcagactggacatccgggcaccactgcaccctgagaaggtgtgcaacaccatctagcagccacctgcctgctcctatgtgccctcaccatccaataaaggccccttggctgtggcatggc

SEQ ID NO: 222 - protein, 662 aa, Homo sapiens
MPRGCHLGTPSWSRRNTPRTGQLERGPQQGRTGHVRPGRSAGGSLLQQESVQQGCSPVGSCPCQQYARSQQPQETAKNDAQSRSWAGLNAGVSLKNTKISSSEWPLRLLSEGADVNAKHRLGWTALMVAAINRNNSVVQVLLAAGADPNLGDDFSSVYKTAKEQGIHSLEDGGQDGASRHITNQWTSALEFRRWLGLPAGVLITREDDFNNRLNNRASFKGCTALHYAVLADDYRTVKELLDGGANPLQRNEMGHTPLDYAREGEVMKLLRTSEAKYQEKQRKREAEERRRFPLEQRLKEHIIGQESAIATVGAAIRRKENGWYDEEHPLVFLFLGSSGIGKTELAKQTAKYMHKDAKKGFIRLDMSEFQERHEVAKFIGSPPGYVGHEEGGQLTKKLKQCPNAVVLFDEVDKAHPDVLTIMLQLFDEGRLTDGKGKTIDCKDAIFIMTSNVASDEIAQHALQLRQEALEMSRNRIAENLGDVQISDKITISKNFKENVIRPILKAHFRRDEFLGRINEIVYFLPFCHSELIQLVNKELNFWAKRAKQRHNITLLWDREVADVLVDGYNVHYGARSIKHEVERRVVNQLAAAYEQDLLPGGCTLRITVEDSDKQLLKSPELPSPQAEKRLPKLRLEIIDKDSKTRRLDIRAPLHPEKVCNTI

SEQ ID NO: 223 - DNA, 1008 bp, Homo sapiens
atgctccaaggccacagctctgtgttccaggccttgctggggaccttcttcacctgggggatgacagcagctggggcagctctcgtgttcgtattctctagtggacagaggcggatcttagatggaagtcttggctttgctgcaggggtcatgttggcagcttcctattggtctcttctggccccagcagttgagatggccacgtcctctgggggcttcggtgcctttgccttcttccctgtggctgttggcttcacccttggagcggcttttgtctacttggctgacctcctgatgcctcacttgggtgcagcagaagacccccagacgaccctggcactgaacttcggctctacgttgatgaagaagaagtctgatcctgagggtcccgcgctgctcttccctgagagtgaactttccatccggatagacaagagtgagaatggtgaggcatatcagagaaagaaggcggcagccactggccttccagagggtcctgctgtccctgtgccttctcgagggaatctggcacagcccggcggcagcagctggaggaggatcgcactgctcatcttggccatcactatacacaacgttccagagggtctcgctgttggagttggatttggggctatagaaaagacggcatctgctacctttgagagtgccaggaatttggccattggaatcgggatccagaatttccccgagggcctggctgtcagccttcccttgcgaggggcaggcttctccacctggagagctttctggtatgggcagctgagcggcatggtggagcccctggccggggtctttggtgcctttgccgtggtgctggctgagcccatcctgccctacgctctggcctttgctgccggtgccatggtctacgtggtcatggacgacatcatccccgaagcccagatcagtggtaatgggaaactggcatcctgggcctccatcctgggatttgtagtgatgatgtcactggacgttggcctgggctag

SEQ ID NO: 224 - protein, 335 aa, Homo sapiens
MLQGHSSVFQALLGTFFTWGMTAAGAALVFVFSSGQRRILDGSLGFAAGVMLAASYWSLLAPAVEMATSSGGFGAFAFFPVAVGFTLGAAFVYLADLLMPHLGAAEDPQTTLALNFGSTLMKKKSDPEGPALLFPESELSIRIDKSENGEAYQRKKAAATGLPEGPAVPVPSRGNLAQPGGSSWRRIALLILAITIHNVPEGLAVGVGFGAIEKTASATFESARNLAIGIGIQNFPEGLAVSLPLRGAGFSTWRAFWYGQLSGMVEPLAGVFGAFAVVLAEPILPYALAFAAGAMVYVVMDDIIPEAQISGNGKLASWASILGFVVMMSLDVGLG

SEQ ID NO: 225 - DNA, 2892 bp, Homo sapiens
atgccgggggccggagcccgggcggaggagggcggcggcggcggcgagggcgcggcgcagggggcggccgcggagcccggggcgggtccggcgcgggagccagcgcggctgtgtggctatctgcagaagctgtcgggcaagggccccctgcgtggctaccgcagccgctggttcgtgttcgacgcgcgccgctgctacctttactatttcaagagtccgcaggacgcgctgcccctcggccacttggacatcgcggacgcctgcttcagctaccagggccccgacgaggcggcggagccgggcacggagccgcccgcgcacttccaggtgcacagcgcgggagccgtcacggtgctcaaggctcccaatcgtcaactcatgacttactggttacaggagcttcagcagaagagatgggaatattgtaacagtcttgacatggtcaagtgggacagcaggacctctccaactcccggggattttcctaagggtcttgtagccagagataacactgatttaatttacccacacccaaatgcttctgcagaaaaagccagaaatgtcctagctgtggagactgtgcctggagagctggtgggagaacaagctgcaaatcagcccgccccagggcatccaaattccattaatttttactctttgaaacagtggggcaatgagctcaagaattcgatgtcttctttccgtcctgggagaggacataatgatagtcggaggactgtgttttataccaatgaagagtgggaacttttagacccaacccctaaggacctagaggagtccatagtacaggaagaaaagaagaagctgacccctgaaggaaacaaaggagtaactggctcaggattcccctttgattttggacgtaacccctacaaaggaaagcgccctttgaaagacataattgggtcgtacaaaaatcgtcacagcagtggtgacccttcaagtgaaggcacatcaggcagtggcagcgtcagcatcaggaagccggcctccgaaatgcaactgcaggtccagagccagcaggaagagctggaacagttaaagaaagacctgtccagtcagaaggagcttgttcgactgctccagcagacagtccggtcatcccagtatgacaagtatttcacaagcagccggctctgtgagggggtcccaaaggacacgctcgagcttctgcaccaaaaggatgatcagattctgggccttaccagccagctggagaggttcagcttggagaaggagagtcttcagcaggaagtaaggacgctgaagagcaaagtgggcgagctcaacgagcagctgggaatgctcatggagaccatccaagccaaggacgaggtcatcatcaagctcagcgagggcgagggcaacgggcctcctcccaccgtggcgcccagctccccttcggttgtgcctgttgccagggaccagctggaactggacaggctgaaagataatctacaggggtacaaaacccaaaacaaatttctaaataaggagattttggaactctcagctctacgaagaaatgcagaaaggagagagagggatctgatggcaaagtattctagcctggaagccaagctctgccagatagaaagtaaatacctgatattgctccaagaaatgaagacaccagtgtgctcagaagaccaggggcccacccgggaggtcatagcccagttgctggaggatgctctgcaggttgagagccaagagcagccggagcaagcatttgttaaacctcatcttgtcagtgaatatgatatttatgggttcaggactgtacctgaggatgatgaggaagagaaattggttgccaaggtccgcgcgttggatctgaagactctctacctcacagaaaaccaggaagtctccactggggtcaagtgggaaaactattttgcaagtacagtgaacagggagatgatgtgctctccagagttaaaaaacctcatccgtgcgggcattccccacgagcaccgttccaaggtgtggaagtggtgtgtggaccgtcacaccaggaagttcaaggacaacactgagcctggccacttccagaccttgctgcagaaggcgctggagaaacagaacccagcctccaagcagattgagctggacttgctgcgaactctgcccaacaacaaacattactcctgccccacctcagaaggcatacagaagttacgcaatgtcctcctcgccttctcctggcggaatccagatatcggctactgtcaaggcctaaacaggttggtggcagtggccctcctgtacctggaacaagaagatgctttctggtgtctcgttaccatagtggaagttttcatgcctcgagactattatacaaagactcttttaggatcccaggtggaccagcgggtgttcagagaccttatgagtgagaagctgcctcggttgcatggccactttgaacagtacaaagtcgactacactctcatcactttcaactggtttctggtggtatttgtggatagtgtcgttagtgacatcctctttaaaatatgggactctttcctttatgaaggaccaaaggttattttccgttttgctctggcactttttaagtacaaggaagaggagattttgaaattgcaagattcgatgtctatatttaagtatctccgctacttcactcgcactatccttgatgctaggaagctgatcagtatctcctttggggacctgaaccctttccccctacgccagatccggaaccgacgcgcctaccacttggagaaagtccggctggagctgaccgagctggaggccatccgtgaggacttcctgcgtgagcgggacaccagccctgacaagggtgagctggtcagtgacgaggaggaggatacctga

SEQ ID NO: 226 - protein, 963 aa, Homo sapiens
MPGAGARAEEGGGGGEGAAQGAAAEPGAGPAREPARLCGYLQKLSGKGPLRGYRSRWFVFDARRCYLYYFKSPQDALPLGHLDIADACFSYQGPDEAAEPGTEPPAHFQVHSAGAVTVLKAPNRQLMTYWLQELQQKRWEYCNSLDMVKWDSRTSPTPGDFPKGLVARDNTDLIYPHPNASAEKARNVLAVETVPGELVGEQAANQPAPGHPNSINFYSLKQWGNELKNSMSSFRPGRGHNDSRRTVFYTNEEWELLDPTPKDLEESIVQEEKKKLTPEGNKGVTGSGFPFDFGRNPYKGKRPLKDIIGSYKNRHSSGDPSSEGTSGSGSVSIRKPASEMQLQVQSQQEELEQLKKDLSSQKELVRLLQQTVRSSQYDKYFTSSRLCEGVPKDTLELLHQKDDQILGLTSQLERFSLEKESLQQEVRTLKSKVGELNEQLGMLMETIQAKDEVIIKLSEGEGNGPPPTVAPSSPSVVPVARDQLELDRLKDNLQGYKTQNKFLNKEILELSALRRNAERRERDLMAKYSSLEAKLCQIESKYLILLQEMKTPVCSEDQGPTREVIAQLLEDALQVESQEQPEQAFVKPHLVSEYDIYGFRTVPEDDEEEKLVAKVRALDLKTLYLTENQEVSTGVKWENYFASTVNREMMCSPELKNLIRAGIPHEHRSKVWKWCVDRHTRKFKDNTEPGHFQTLLQKALEKQNPASKQIELDLLRTLPNNKHYSCPTSEGIQKLRNVLLAFSWRNPDIGYCQGLNRLVAVALLYLEQEDAFWCLVTIVEVFMPRDYYTKTLLGSQVDQRVFRDLMSEKLPRLHGHFEQYKVDYTLITFNWFLVVFVDSVVSDILFKIWDSFLYEGPKVIFRFALALFKYKEEEILKLQDSMSIFKYLRYFTRTILDARKLISISFGDLNPFPLRQIRNRRAYHLEKVRLELTELEAIREDFLRERDTSPDKGELVSDEEEDT

SEQ ID NO: 227 - DNA, 2745 bp, Homo sapiens
atgccgggggccggagcccgggcggaggagggcggcggcggcggcgagggcgcggcgcagggggcggccgcggagcccggggcgggtccggcgcgggagccagcgcggctgtgtggctatctgcagaagctgtcgggcaagggccccctgcgtggctaccgcagccgctggttcgtgttcgacgcgcgccgctgctacctttactatttcaagagtccgcaggacgcgctgcccctcggccacttggacatcgcggacgcctgcttcagctaccagggccccgacgaggcggcggagccgggcacggagccgcccgcgcacttccaggtgcacagcgcgggagccgtcacggtgctcaaggctcccaatcgtcaactcatgacttactggttacaggagcttcagcagaagagatgggaatattgtaacagtcttgacatggtcaagtgggacagcaggacctctccaactcccggggattttcctaagggtcttgtagccagagataacactgatttaatttacccacacccaaatgcttctgcagaaaaagccagaaatgtcctagctgtggagactgtgcctggagagctggtgggagaacaagctgcaaatcagcccgccccagggcatccaaattccattaatttttactctttgaaacagtggggcaatgagctcaagaattcgatgtcttctttccgtcctgggagaggacataatgatagtcggaggactgtgttttataccaatgaagagtgggaacttttagacccaacccctaaggacctagaggagtccatagtacaggaagaaaagaagaagctgacccctgaaggaaacaaaggagtaactggctcaggattcccctttgattttggacgtaacccctacaaaggaaagcgccctttgaaagacataattgggtcgtacaaaaatcgtcacagcagtggtgacccttcaagtgaaggcacatcaggcagtggcagcgtcagcatcaggaagccggcctccgaaatgcaactgcaggtccagagccagcaggaagagctggaacagttaaagaaagacctgtccagtcagaaggagcttgttcgactgctccagcagacagtccggtcatcccagtatgacaagtatttcacaagcagccggctctgtgagggggtcccaaaggacacgctcgagcttctgcaccaaaaggatgatcagattctgggccttaccagccagctggagaggttcagcttggagaaggagagtcttcagcaggaagtaaggacgctgaagagcaaagtgggcgagctcaacgagcagctgggaatgctcatggagaccatccaagccaaggacgaggtcatcatcaagctcagcgagggcgagggcaacgggcctcctcccaccgtggcgcccagctccccttcggttgtgcctgttgccagggaccagctggaactggacaggctgaaagataatctacaggggtacaaaacccaaaacaaatttctaaataaggagattttggaactctcagctctacgaagaaatgcagaaaggagagagagggatctgatggcaaagtattctagcctggaagccaagctctgccagatagaaagtaaatacctgatattgctccaagaaatgaagacaccagtgtgctcagaagaccaggggcccacccgggaggtcatagcccagttgctggaggatgctctgcaggttgagagccaagagcagccggagcaagcatttgttaaacctcatcttgtcagtgaatatgatatttatgggttcaggactgtacctgaggatgatgaggaagagaaattggttgccaaggtccgcgcgttggatctgaagactctctacctcacagaaaaccaggaagtctccactggggtcaagtgggaaaactattttgcaagtacagtgaacagggagatgatgtgctctccagagttaaaaaacctcatccgtgcgggcattccccacgagcaccgttccaaggtgtggaagtggtgtgtggaccgtcacaccaggaagttcaaggacaacactgagcctggccacttccagaccttgctgcagaaggcgctggagaaacagaacccagcctccaagcagattgagctggacttgctgcgaactctgcccaacaacaaacattactcctgccccacctcagaaggcatacagaagttacgcaatgtcctcctcgccttctcctggcggaatccagatatcggctactgtcaaggcctaaacaggttggtggcagtggccctcctgtacctggaacaagaagatgctttctggtgtctcgttaccatagtggaagttttcatgcctcgagactattatacaaagactcttttaggatcccaggtggaccagcgggtgttcagagaccttatgagtgagaagctgcctcggttgcatggccactttgaacagtacaaagtcgactacactctcatcactttcaactggtttctggtggtatttgtggatagtgtcgttagtgacatcctctttaaaatatgggactctttcctttatgaaggaccaaaggttattttccgttttgctctggcactttttaagtacaaggaagaggagattttgaaattgcaagattcgatgtctatatttaagtatctccgctacttcactcgcactatccttgatgctagatccggaaccgacgcgcctaccacttggagaaagtccggctggagctga

SEQ ID NO: 228 - protein, 914 aa, Homo sapiens
MPGAGARAEEGGGGGEGAAQGAAAEPGAGPAREPARLCGYLQKLSGKGPLRGYRSRWFVFDARRCYLYYFKSPQDALPLGHLDIADACFSYQGPDEAAEPGTEPPAHFQVHSAGAVTVLKAPNRQLMTYWLQELQQKRWEYCNSLDMVKWDSRTSPTPGDFPKGLVARDNTDLIYPHPNASAEKARNVLAVETVPGELVGEQAANQPAPGHPNSINFYSLKQWGNELKNSMSSFRPGRGHNDSRRTVFYTNEEWELLDPTPKDLEESIVQEEKKKLTPEGNKGVTGSGFPFDFGRNPYKGKRPLKDIIGSYKNRHSSGDPSSEGTSGSGSVSIRKPASEMQLQVQSQQEELEQLKKDLSSQKELVRLLQQTVRSSQYDKYFTSSRLCEGVPKDTLELLHQKDDQILGLTSQLERFSLEKESLQQEVRTLKSKVGELNEQLGMLMETIQAKDEVIIKLSEGEGNGPPPTVAPSSPSVVPVARDQLELDRLKDNLQGYKTQNKFLNKEILELSALRRNAERRERDLMAKYSSLEAKLCQIESKYLILLQEMKTPVCSEDQGPTREVIAQLLEDALQVESQEQPEQAFVKPHLVSEYDIYGFRTVPEDDEEEKLVAKVRALDLKTLYLTENQEVSTGVKWENYFASTVNREMMCSPELKNLIRAGIPHEHRSKVWKWCVDRHTRKFKDNTEPGHFQTLLQKALEKQNPASKQIELDLLRTLPNNKHYSCPTSEGIQKLRNVLLAFSWRNPDIGYCQGLNRLVAVALLYLEQEDAFWCLVTIVEVFMPRDYYTKTLLGSQVDQRVFRDLMSEKLPRLHGHFEQYKVDYTLITFNWFLVVFVDSVVSDILFKIWDSFLYEGPKVIFRFALALFKYKEEEILKLQDSMSIFKYLRYFTRTILDARSGTDAPTTWRKSGWS

SEQ ID NO: 229 - DNA, 2537 bp, Homo sapiens
tcaaggctcccaatcgtcaactcatgacttactggttacaggagcttcagcagaagagatgggaatattgtaacagtcttgacatggtcaagtgggacagcaggacctctccaactcccggggattttcctaagggtcttgtagccagagataacactgatttaatttacccacacccaaatgcttctgcagaaaaagccagaaatgtcctagctgtggagactgtgcctggagagctggtgggagaacaagctgcaaatcagcccgccccagggcatccaaattccattaatttttactctttgaaacagtggggcaatgagctcaagaattcgatgtcttctttccgtcctgggagaggacataatgatagtcggaggactgtgttttataccaatgaagagtgggaacttttagacccaacccctaaggacctagaggagtccatagtacaggaagaaaagaagaagctgacccctgaaggaaacaaaggagtaactggctcaggattcccctttgattttggacgtaacccctacaaaggaaagcgccctttgaaagacataattgggtcgtacaaaaatcgtcacagcagtggtgacccttcaagtgaaggcacatcaggcagtggcagcgtcagcatcaggaagccggcctccgaaatgcaactgcaggtccagagccagcaggaagagctggaacagttaaagaaagacctgtccagtcagaaggagcttgttcgactgctccagcagacagtccggtcatcccagtatgacaagtatttcacaagcagccggctctgtgagggggtcccaaaggacacgctcgagcttctgcaccaaaaggatgatcagattctgggccttaccagccagctggagaggttcagcttggagaaggagagtcttcagcaggaagtaaggacgctgaagagcaaagtgggcgagctcaacgagcagctgggaatgctcatggagaccatccaagccaaggacgaggtcatcatcaagctcagcgagggcgagggcaacgggcctcctcccaccgtggcgcccagctccccttcggttgtgcctgttgccagggaccagctggaactggacaggctgaaagataatctacaggggtacaaaacccaaaacaaatttctaaataaggagattttggaactctcagctctacgaagaaatgcagaaaggagagagagggatctgatggcaaagtattctagcctggaagccaagctctgccagatagaaagtaaatacctgatattgctccaagaaatgaagacaccagtgtgctcagaagaccaggggcccacccgggaggtcatagcccagttgctggaggatgctctgcaggttgagagccaagagcagccggagcaagcatttgttaaacctcatcttgtcagtgaatatgatatttatgggttcaggactgtacctgaggatgatgaggaagagaaattggttgccaaggtccgcgcgttggatctgaagactctctacctcacagaaaaccaggaagtctccactggggtcaagtgggaaaactattttgcaagtacagtgaacagggagatgatgtgctctccagagttaaaaaacctcatccgtgcgggcattccccacgagcaccgttccaaggtgtggaagtggtgtgtggaccgtcacaccaggaagttcaaggacaacactgagcctggccacttccagaccttgctgcagaaggcgctggagaaacagaacccagcctccaagcagattgagctggacttgctgcgaactctgcccaacaacaaacattactcctgccccacctcagaaggcatacagaagttacgcaatgtcctcctcgccttctcctggcggaatccagatatcggctactgtcaaggcctaaacaggttggtggcagtggccctcctgtacctggaacaagaagatgctttctggtgtctcgttaccatagtggaagttttcatgcctcgagactattatacaaagactcttttaggatcccaggtggaccagcgggtgttcagagaccttatgagtgagaagctgcctcggttgcatggccactttgaacagtacaaagtcgactacactctcatcactttcaactggtttctggtggtatttgtggatagtgtcgttagtgacatcctctttaaaatatgggactctttcctttatgaaggaccaaaggttattttccgttttgctctggcactttttaagtacaaggaagaggagattttgaaattgcaagattcgatgtctatatttaagtatctccgctacttcactcgcactatccttgatgctaggaagctgatcagtatctcctttggggacctgaaccctttccccctacgccagatccggaaccgacgcgcctaccacttggagaaagtccggctggagctgaccgagctggaggccatccgtgaggacttcctgcgtgagcgggacaccagccctgacaagggtgagctggtcagtgacgaggaggaggatacctga

SEQ ID NO: 230 - protein, 845 aa, Homo sapiens
  misc_feature (1)..(1): Xaa can be any naturally occurring amino acid
XKAPNRQLMTYWLQELQQKRWEYCNSLDMVKWDSRTSPTPGDFPKGLVARDNTDLIYPHPNASAEKARNVLAVETVPGELVGEQAANQPAPGHPNSINFYSLKQWGNELKNSMSSFRPGRGHNDSRRTVFYTNEEWELLDPTPKDLEESIVQEEKKKLTPEGNKGVTGSGFPFDFGRNPYKGKRPLKDIIGSYKNRHSSGDPSSEGTSGSGSVSIRKPASEMQLQVQSQQEELEQLKKDLSSQKELVRLLQQTVRSSQYDKYFTSSRLCEGVPKDTLELLHQKDDQILGLTSQLERFSLEKESLQQEVRTLKSKVGELNEQLGMLMETIQAKDEVIIKLSEGEGNGPPPTVAPSSPSVVPVARDQLELDRLKDNLQGYKTQNKFLNKEILELSALRRNAERRERDLMAKYSSLEAKLCQIESKYLILLQEMKTPVCSEDQGPTREVIAQLLEDALQVESQEQPEQAFVKPHLVSEYDIYGFRTVPEDDEEEKLVAKVRALDLKTLYLTENQEVSTGVKWENYFASTVNREMMCSPELKNLIRAGIPHEHRSKVWKWCVDRHTRKFKDNTEPGHFQTLLQKALEKQNPASKQIELDLLRTLPNNKHYSCPTSEGIQKLRNVLLAFSWRNPDIGYCQGLNRLVAVALLYLEQEDAFWCLVTIVEVFMPRDYYTKTLLGSQVDQRVFRDLMSEKLPRLHGHFEQYKVDYTLITFNWFLVVFVDSVVSDILFKIWDSFLYEGPKVIFRFALALFKYKEEEILKLQDSMSIFKYLRYFTRTILDARKLISISFGDLNPFPLRQIRNRRAYHLEKVRLELTELEAIREDFLRERDTSPDKGELVSDEEEDT

SEQ ID NO: 231 - DNA, 450 bp, Homo sapiens
atgggggctgcggtgtttttcggctgcactttcgtcgcgttcggcccggccttcgcgcttttcttgatcactgtggctggggacccgcttcgcgttatcatcctggtcgcagggaaggcagatgaggggttagcatcgctgagtgaggacggaagatcacccatctccatccgccagatggcctatgtttctggtctctccttcggtatcatcagtggtgtcttctctgttatcaatattttggctgatgcacttgggccaggtgtggttgggatccatggagactcaccctattacttcctgacttcagcctttctgacagcagccattatcctgctccataccttttggggagttgtgttctttgatgcctgtgagaggagacggtactgggctttgggcctggtggttgggagtcacctactgacatcgggactgacattcctgaac

SEQ ID NO: 232 - protein, 150 aa, Homo sapiens
MGAAVFFGCTFVAFGPAFALFLITVAGDPLRVIILVAGKADEGLASLSEDGRSPISIRQMAYVSGLSFGIISGVFSVINILADALGPGVVGIHGDSPYYFLTSAFLTAAIILLHTFWGVVFFDACERRRYWALGLVVGSHLLTSGLTFLN

SEQ ID NO: 233 - DNA, 744 bp, Homo sapiens
atgggggctgcggtgtttttcggctgcactttcgtcgcgttcggcccggccttcgcgcttttcttgatcactgtggctggggacccgcttcgcgttatcatcctggtcgcaggggcatttttctggctggtctccctgctcctggcctctgtggtctggttcatcttggtccatgtgaccgaccggtcagatgcccggctccagtacggcctcctgatttttggtgctgctgtctctgtccttctacaggaggtgttccgctttgcctactacaagctgcttaagaaggcagatgaggggttagcatcgctgagtgaggacggaagatcacccatctccatccgccagatggcctatgtttctggtctctccttcggtatcatcagtggtgtcttctctgttatcaatattttggctgatgcacttgggccaggtgtggttgggatccatggagactcaccctattacttcctgacttcagcctttctgacagcagccattatcctgctccataccttttggggagttgtgttctttgatgcctgtgagaggagacggtactgggctttgggcctggtggttgggagtcacctactgacatcgggactgacattcctgaacccctggtatgaggccagcctgctgcccatctatgcagtcactgtttccatggggctctgggccttcatcacagctggagggtccctccgaagtattcagcgcagcctcttgtgtaaggactga

SEQ ID NO: 234 - protein, 247 aa, Homo sapiens
MGAAVFFGCTFVAFGPAFALFLITVAGDPLRVIILVAGAFFWLVSLLLASVVWFILVHVTDRSDARLQYGLLIFGAAVSVLLQEVFRFAYYKLLKKADEGLASLSEDGRSPISIRQMAYVSGLSFGIISGVFSVINILADALGPGVVGIHGDSPYYFLTSAFLTAAIILLHTFWGVVFFDACERRRYWALGLVVGSHLLTSGLTFLNPWYEASLLPIYAVTVSMGLWAFITAGGSLRSIQRSLLCKD

SEQ ID NO: 235 - DNA, 798 bp, Homo sapiens
atgggggctgcggtgtttttcggctgcactttcgtcgcgttcggcccggccttcgcgcttttcttgatcactgtggctggggacccgcttcgcgttatcatcctggtcgcaggggcatttttctggctggtctccctgctcctggcctctgtggtctggttcatcttggtccatgtgaccgaccggtcagatgcccggctccagtacggcctcctgatttttggtgctgctgtctctgtccttctacaggaggtgttccgctttgcctactacaagctgcttaagaaggcagatgaggggttagcatcgctgagtgaggacggaagatcacccatctccatccgccagatggcctatgtttctggtctctccttcggtatcatcagtggtgtcttctctgttatcaatattttggctgatgcacttgggccaggtgtggttgggatccatggagactcaccctattacttcctgacttcagcctttctgacagcagccattatcctgctccataccttttggggagttgtgttctttgatgcctgtgagaggagacggtactgggctttgggcctggtggttgggagtcacctactgacatcgggactgacattcctgaacccctggtatgaggccagcctgctgcccatctatgcagtcactgtttccatggggctctgggccttcatcacagctggagggtccctccgaagtattcagcgcagcctcttgtgccgacggcaggaggacagtcgggtgatggtgtattctgccctgcgcatcccacccgaggactga

SEQ ID NO: 236 - protein, 265 aa, Homo sapiens
MGAAVFFGCTFVAFGPAFALFLITVAGDPLRVIILVAGAFFWLVSLLLASVVWFILVHVTDRSDARLQYGLLIFGAAVSVLLQEVFRFAYYKLLKKADEGLASLSEDGRSPISIRQMAYVSGLSFGIISGVFSVINILADALGPGVVGIHGDSPYYFLTSAFLTAAIILLHTFWGVVFFDACERRRYWALGLVVGSHLLTSGLTFLNPWYEASLLPIYAVTVSMGLWAFITAGGSLRSIQRSLLCRRQEDSRVMVYSALRIPPED

SEQ ID NO: 237 - DNA, 588 bp, Homo sapiens
atgggggctgcggtgtttttcggctgcactttcgtcgcgttcggcccggccttcgcgcttttcttgatcactgtggctggggacccgcttcgcgttatcatcctggtcgcagggaggtgttccgctttgcctactacaagctgcttaatttctggtctctccttcggtatcatcagtggtgtcttctctgttatcaatattttggctgatgcacttgggccaggtgtggttgggatccatggagactcaccctattacttcctgacttcagcctttctgacagcagccattatcctgctccataccttttggggagttgtgttctttgatgcctgtgagaggagacggtactgggctttgggcctggtggttgggagtcacctactgacatcgggactgacattcctgaacccctggtatgaggccagcctgctgcccatctatgcagtcactgtttccatggggctctgggccttcatcacagctggagggtccctccgaagtattcagcgcagcctcttgtgccgacggcaggaggacagtcgggtgatggtgtattctgccctgcgcatcccacccgaggactga

SEQ ID NO: 238 - protein, 195 aa, Homo sapiens
MGAAVFFGCTFVAFGPAFALFLITVAGDPLRVIILVAGRCSALPTTSCLISGLSFGIISGVFSVINILADALGPGVVGIHGDSPYYFLTSAFLTAAIILLHTFWGVVFFDACERRRYWALGLVVGSHLLTSGLTFLNPWYEASLLPIYAVTVSMGLWAFITAGGSLRSIQRSLLCRRQEDSRVMVYSALRIPPED

SEQ ID NO: 239 - DNA, 345 bp, Homo sapiens
atgggggctgcggtgtttttcggctgcactttcgtcgcgttcggcccggccttcgcgcttttcttgatcactgtggctggggacccgcttcgcgttatcatcctggtcgcaggggcatttttctggctggtctccctgctcctggcctctgtggtctggttcatcttggtccatgtgaccgaccggtcagatgcccggctccagtacggcctcctgatttttggtgctgctgtctctgtccttctacaggaggtgttccgctttgcctactacaagctgcttaatttctggtctctccttcggtatcatcagtggtgtcttctctgttatcaatattttggctga

SEQ ID NO: 240 - protein, 114 aa, Homo sapiens
MGAAVFFGCTFVAFGPAFALFLITVAGDPLRVIILVAGAFFWLVSLLLASVVWFILVHVTDRSDARLQYGLLIFGAAVSVLLQEVFRFAYYKLLNFWSLLRYHQWCLLCYQYFG

SEQ ID NO: 241 - DNA, 627 bp, Homo sapiens
atgggggctgcggtgtttttcggctgcactttcgtcgcgttcggcccggccttcgcgcttttcttgatcactgtggctggggacccgcttcgcgttatcatcctggtcgcagggaaggcagatgaggggttagcatcgctgagtgaggacggaagatcacccatctccatccgccagatggcctatgtttctggtctctccttcggtatcatcagtggtgtcttctctgttatcaatattttggctgatgcacttgggccaggtgtggttgggatccatggagactcaccctattacttcctgacttcagcctttctgacagcagccattatcctgctccataccttttggggagttgtgttctttgatgcctgtgagaggagacggtactgggctttgggcctggtggttgggagtcacctactgacatcgggactgacattcctgaacccctggtatgaggccagcctgctgcccatctatgcagtcactgtttccatggggctctgggccttcatcacagctggagggtccctccgaagtattcagcgcagcctcttgtgccgacggcaggaggacagtcgggtgatggtgtattctgccctgcgcatcccacccgaggactga

SEQ ID NO: 242 - protein, 208 aa, Homo sapiens
MGAAVFFGCTFVAFGPAFALFLITVAGDPLRVIILVAGKADEGLASLSEDGRSPISIRQMAYVSGLSFGIISGVFSVINILADALGPGVVGIHGDSPYYFLTSAFLTAAIILLHTFWGVVFFDACERRRYWALGLVVGSHLLTSGLTFLNPWYEASLLPIYAVTVSMGLWAFITAGGSLRSIQRSLLCRRQEDSRVMVYSALRIPPED

SEQ ID NO: 243 - DNA, 1371 bp, Homo sapiens
atggggtacttccggtgtgcacgtgctgggtccttcggcaggaggaggaagatggagcccagcaccgcggcccgggcttgggccctcttttggttgctgctgcccttgcttggcgcggtttgcgccagcggaccccgcaccttagtgctgctggacaacctcaacgtgcgggagactcattcgcttttcttccggagcctgaaggaccggggctttgagctcacattcaagaccgctgatgaccccagcctgtctctcataaagtatggggaattcctctatgacaatctcatcattttctccccttcggtagaagattttggaggcaacatcaacgtggagaccatcagtgcctttattgacggcggaggcagtgtgctggtagctgccagctccgacattggtgaccctcttcgagagctgggcagtgagtgcgggattgagtttgacgaggagaaaacggctgtcattgaccatcacaactatgacatctcagaccttggccagcatacgctcatcgtggctgacactgagaacctgctgaaggccccaaccatcgttgggaaatcatctctaaatcccatcctctttcgaggtgttgggatggtggccgatcctgataaccctttggtgctggacatcctgacgggctcttccacctcttactccttcttcccggacaagcctatcacccagtatccacatgcggtggggaagaacaccctcctcattgctgggctccaggccaggaacaatgcccgcgtcatcttcagcggctccctcgacttcttcagcgactccttcttcaactcagcagtgcagaaggcggcgcccggctcccagaggtattcccagacaggcaactatgaactagctgtggccctctcccgctgggtgttcaaggaggagggtgtcctccgtgtggggcctgtgtcccatcatcgggtgggcgagacagccccacccaatgcctacactgtcactgacctagtggagtatagcatcgtgatccagcagctctcaaatggcaaatgggtcccctttgatggcgatgacattcagctggagtttgtccgcattgatccttttgtgaggaccttcctgaagaagaaaggtggcaaatacagtgttcagttcaagttgcccgacgtgtatggtgtattccagtttaaagtggattacaaccggctaggctacacacacctgtactcttccactcaggtatccgtgcggccactccagcacacgcagtatgagcgcttcatcccctcggcctacccctactacgccagcgccttctccatgatgctggggctcttcatcttcagcatcgtcttcttgcacatgaaggagaaggagaagtccgactga

SEQ ID NO: 244 - protein, 456 aa, Homo sapiens
MGYFRCARAGSFGRRRKMEPSTAARAWALFWLLLPLLGAVCASGPRTLVLLDNLNVRETHSLFFRSLKDRGFELTFKTADDPSLSLIKYGEFLYDNLIIFSPSVEDFGGNINVETISAFIDGGGSVLVAASSDIGDPLRELGSECGIEFDEEKTAVIDHHNYDISDLGQHTLIVADTENLLKAPTIVGKSSLNPILFRGVGMVADPDNPLVLDILTGSSTSYSFFPDKPITQYPHAVGKNTLLIAGLQARNNARVIFSGSLDFFSDSFFNSAVQKAAPGSQRYSQTGNYELAVALSRWVFKEEGVLRVGPVSHHRVGETAPPNAYTVTDLVEYSIVIQQLSNGKWVPFDGDDIQLEFVRIDPFVRTFLKKKGGKYSVQFKLPDVYGVFQFKVDYNRLGYTHLYSSTQVSVRPLQHTQYERFIPSAYPYYASAFSMMLGLFIFSIVFLHMKEKEKSD

SEQ ID NO: 245 - DNA, 576 bp, Homo sapiens
atggcttcggggcaaggcccaggtcctcccaggcaggagtgcggagagcctgccctgccctctgcttctgaggagcaggtagcccaggacacagaggaggttttccgcagctacgttttttaccgccatcagcagcaacctagcagcaccatggggcaggtgggacggcagctcgccatcatcggggacgacatcaaccgacgctatgactcagagttccagaccatgttgcagcacctgcagcccacggcagagaatgcctatgagtacttcaccaagattgccaccagcctgtttgagagtggcatcaattggggccgtgtggtggctcttctgggcttcggctaccgtctggccctacacgtctaccagcatggcctgactggcttcctaggccaggtgacccgcttcgtggtcgacttcatgctgcatcactgcattgcccggtggattgcacagaggggtggctgggtggcagccctgaacttgggcaatggtcccatcctgaacgtgctggtggttctgggtgtggttctgttgggccagtttgtggtacgaagattcttcaaatcatga

SEQ ID NO: 246 - protein, 191 aa, Homo sapiens
MASGQGPGPPRQECGEPALPSASEEQVAQDTEEVFRSYVFYRHQQQPSSTMGQVGRQLAIIGDDINRRYDSEFQTMLQHLQPTAENAYEYFTKIATSLFESGINWGRVVALLGFGYRLALHVYQHGLTGFLGQVTRFVVDFMLHHCIARWIAQRGGWVAALNLGNGPILNVLVVLGVVLLGQFVVRRFFKS

SEQ ID NO: 247 - DNA, 636 bp, Homo sapiens
atggcttcggggcaaggcccaggtcctcccaggcaggagtgcggagagcctgccctgccctctgcttctgaggagcaggtagcccaggacacagaggaggttttccgcagctacgttttttaccgccatcagcaggaacaggaggctgaaggggtggctgcccctgccgacccagagatggtcaccttacctctgcaacctagcagcaccatggggcaggtgggacggcagctcgccatcatcggggacgacatcaaccgacgctatgactcagagttccagaccatgttgcagcacctgcagcccacggcagagaatgcctatgagtacttcaccaagattgccaccagcctgtttgagagtggcatcaattggggccgtgtggtggctcttctgggcttcggctaccgtctggccctacacgtctaccagcatggcctgactggcttcctaggccaggtgacccgcttcgtggtcgacttcatgctgcatcactgcattgcccggtggattgcacagaggggtggctgggtggcagccctgaacttgggcaatggtcccatcctgaacgtgctggtggttctgggtgtggttctgttgggccagtttgtggtacgaagattcttcaaatcatga

SEQ ID NO: 248 - protein, 211 aa, Homo sapiens
MASGQGPGPPRQECGEPALPSASEEQVAQDTEEVFRSYVFYRHQQEQEAEGVAAPADPEMVTLPLQPSSTMGQVGRQLAIIGDDINRRYDSEFQTMLQHLQPTAENAYEYFTKIATSLFESGINWGRVVALLGFGYRLALHVYQHGLTGFLGQVTRFVVDFMLHHCIARWIAQRGGWVAALNLGNGPILNVLVVLGVVLLGQFVVRRFFKS

SEQ ID NO: 249 - DNA, 1410 bp, Homo sapiens
atgctctgtctgtgcctgtatgtgccggtcatcggggaagcccagaccgagttccagtactttgagtcgaaggggctccctgccgagctgaagtccattttcaagctcagtgtcttcatcccctcccaggaattctccacctaccgccagtggaagcagaaaattgtacaagctggagataaggaccttgatgggcagctagactttgaagaatttgtccattatctccaagatcatgagaagaagctgaggctggtgtttaagagtttggacaaaaagaatgatggacgcattgacgcgcaggagatcatgcagtccctgcgggacttgggagtcaagatatctgaacagcaggcagaaaaaattctcaagagcatggataaaaacggcacgatgaccattgactggaacgagtggagagactaccacctcctccaccccgtggaaaacatccccgagatcatcctctactggaagcattccacgatctttgatgtgggtgagaatctaacggtcccggatgagttcacagtggaggagaggcagacggggatgtggtggagacacctggtggcaggaggtggggcaggggccgtatccagaacctgcacggcccccctggacaggctcaaggtgctcatgcaggtccatgcctcccgcagcaacaacatgggcatcgttggtggcttcactcagatgattcgagaaggaggggccaggtcactctggcggggcaatggcatcaacgtcctcaaaattgcccccgaatcagccatcaaattcatggcctatgagcagatcaagcgccttgttggtagtgaccaggagactctgaggattcacgagaggcttgtggcagggtccttggcaggggccatcgcccagagcagcatctacccaatggaggtcctgaagacccggatggcgctgcggaagacaggccagtactcaggaatgctggactgcgccaggaggatcctggccagagagggggtggccgccttctacaaaggctatgtccccaacatgctgggcatcatcccctatgccggcatcgaccttgcagtctacgagacgctcaagaatgcctggctgcagcactatgcagtgaacagcgcggaccccggcgtgtttgtgctcctggcctgtggcaccatgtccagtacctgtggccagctggccagctaccccctggccctagtcaggacccggatgcaggcgcaagcctctattgagggcgctccggaggtgaccatgagcagcctcttcaaacatatcctgcggaccgagggggccttcgggctgtacagggggctggcccccaacttcatgaaggtcatcccagctgtgagcatcagctacgtggtctacgagaacctgaagatcaccctgggcgtgcagtcgcggtga

SEQ ID NO: 250 - protein, 469 aa, Homo sapiens
MLCLCLYVPVIGEAQTEFQYFESKGLPAELKSIFKLSVFIPSQEFSTYRQWKQKIVQAGDKDLDGQLDFEEFVHYLQDHEKKLRLVFKSLDKKNDGRIDAQEIMQSLRDLGVKISEQQAEKILKSMDKNGTMTIDWNEWRDYHLLHPVENIPEIILYWKHSTIFDVGENLTVPDEFTVEERQTGMWWRHLVAGGGAGAVSRTCTAPLDRLKVLMQVHASRSNNMGIVGGFTQMIREGGARSLWRGNGINVLKIAPESAIKFMAYEQIKRLVGSDQETLRIHERLVAGSLAGAIAQSSIYPMEVLKTRMALRKTGQYSGMLDCARRILAREGVAAFYKGYVPNMLGIIPYAGIDLAVYETLKNAWLQHYAVNSADPGVFVLLACGTMSSTCGQLASYPLALVRTRMQAQASIEGAPEVTMSSLFKHILRTEGAFGLYRGLAPNFMKVIPAVSISYVVYENLKITLGVQSR

SEQ ID NO: 251 - DNA, 1506 bp, Homo sapiens
atgttgcagatgctgtggcatttcctagctagctttttccccagggctgggtgccacggctccagagagggggacgatcgtgaagtcagaggcaccccagcccctgcctggagagaccagatggcaagctttttggggaaacaggacggaagggctgaggccacggaaaaaagacccaccattttgctggtggttggacctgcagagcagtttcctaagaaaattgtacaagctggagataaggaccttgatgggcagctagactttgaagaatttgtccattatctccaagatcatgagaagaagctgaggctggtgtttaagagtttggacaaaaagaatgatggacgcattgacgcgcaggagatcatgcagtccctgcgggacttgggagtcaagatatctgaacagcaggcagaaaaaattctcaagagaatacgaacgggccatttctggggccctgtcacctacatggataaaaacggcacgatgaccattgactggaacgagtggagagactaccacctcctccaccccgtggaaaacatccccgagatcatcctctactggaagcattccacgatctttgatgtgggtgagaatctaacggtcccggatgagttcacagtggaggagaggcagacggggatgtggtggagacacctggtggcaggaggtggggcaggggccgtatccagaacctgcacggcccccctggacaggctcaaggtgctcatgcaggtccatgcctcccgcagcaacaacatgggcatcgttggtggcttcactcagatgattcgagaaggaggggccaggtcactctggcggggcaatggcatcaacgtcctcaaaattgcccccgaatcagccatcaaattcatggcctatgagcagatcaagcgccttgttggtagtgaccaggagactctgaggattcacgagaggcttgtggcagggtccttggcaggggccatcgcccagagcagcatctacccaatggaggtcctgaagacccggatggcgctgcggaagacaggccagtactcaggaatgctggactgcgccaggaggatcctggccagagagggggtggccgccttctacaaaggctatgtccccaacatgctgggcatcatcccctatgccggcatcgaccttgcagtctacgagacgctcaagaatgcctggctgcagcactatgcagtgaacagcgcggaccccggcgtgtttgtgctcctggcctgtggcaccatgtccagtacctgtggccagctggccagctaccccctggccctagtcaggacccggatgcaggcgcaagcctctattgagggcgctccggaggtgaccatgagcagcctcttcaaacatatcctgcggaccgagggggccttcgggctgtacagggggctggcccccaacttcatgaaggtcatcccagctgtgagcatcagctacgtggtctacgagaacctgaagatcaccctgggcgtgcagtcgcggtga

SEQ ID NO: 252 - protein, 501 aa, Homo sapiens
MLQMLWHFLASFFPRAGCHGSREGDDREVRGTPAPAWRDQMASFLGKQDGRAEATEKRPTILLVVGPAEQFPKKIVQAGDKDLDGQLDFEEFVHYLQDHEKKLRLVFKSLDKKNDGRIDAQEIMQSLRDLGVKISEQQAEKILKRIRTGHFWGPVTYMDKNGTMTIDWNEWRDYHLLHPVENIPEIILYWKHSTIFDVGENLTVPDEFTVEERQTGMWWRHLVAGGGAGAVSRTCTAPLDRLKVLMQVHASRSNNMGIVGGFTQMIREGGARSLWRGNGINVLKIAPESAIKFMAYEQIKRLVGSDQETLRIHERLVAGSLAGAIAQSSIYPMEVLKTRMALRKTGQYSGMLDCARRILAREGVAAFYKGYVPNMLGIIPYAGIDLAVYETLKNAWLQHYAVNSADPGVFVLLACGTMSSTCGQLASYPLALVRTRMQAQASIEGAPEVTMSSLFKHILRTEGAFGLYRGLAPNFMKVIPAVSISYVVYENLKITLGVQSR

SEQ ID NO: 253 - DNA, 1512 bp, Homo sapiens
atggtgagcagtgtgttgtgccgctgtgtggcctccccgccgccggacgccgccgccaccgccgcctcttcgtctgcctcatcgccggcgtccgtgggggacccctgcggcggcgctatctgcgggggcccggaccaccggctgcgcctgtggagactctttcagacgctcgacgtcaaccgggacggcggcctgtgtgtcaacgacctggcggtggggctgcggcgcctgggactgcaccgcaccgagggcgagctccagaaaattgtacaagctggagataaggaccttgatgggcagctagactttgaagaatttgtccattatctccaagatcatgagaagaagctgaggctggtgtttaagagtttggacaaaaagaatgatggacgcattgacgcgcaggagatcatgcagtccctgcgggacttgggagtcaagatatctgaacagcaggcagaaaaaattctcaagagcatggataaaaacggcacgatgaccattgactggaacgagtggagagactaccacctcctccaccccgtggaaaacatccccgagatcatcctctactggaagcattccacgatctttgatgtgggtgagaatctaacggtcccggatgagttcacagtggaggagaggcagacggggatgtggtggagacacctggtggcaggaggtggggcaggggccgtatccagaacctgcacggcccccctggacaggctcaaggtgctcatgcaggtccatgcctcccgcagcaacaacatgggcatcgttggtggcttcactcagatgattcgagaaggaggggccaggtcactctggcggggcaatggcatcaacgtcctcaaaattgcccccgaatcagccatcaaattcatggcctatgagcagatcaagcgccttgttggtagtgaccaggagactctgaggattcacgagaggcttgtggcagggtccttggcaggggccatcgcccagagcagcatctacccaatggaggtcctgaagacccggatggcgctgcggaagacaggccagtactcaggaatgctggactgcgccaggaggatcctggccagagagggggtggccgccttctacaaaggctatgtccccaacatgctgggcatcatcccctatgccggcatcgaccttgcagtctacgagacgctcaagaatgcctggctgcagcactatgcagtgaacagcgcggaccccggcgtgtttgtgctcctggcctgtggcaccatgtccagtacctgtggccagctggccagctaccccctggccctagtcaggacccggatgcaggcgcaagcctctattgagggcgctccggaggtgaccatgagcagcctcttcaaacatatcctgcggaccgagggggccttcgggctgtacagggggctggcccccaacttcatgaaggtcatcccagctgtgagcatcagctacgtggtctacgagaacctgaagatcaccctgggcgtgcagtcgcggtga

SEQ ID NO: 254 - protein, 503 aa, Homo sapiens
MVSSVLCRCVASPPPDAAATAASSSASSPASVGDPCGGAICGGPDHRLRLWRLFQTLDVNRDGGLCVNDLAVGLRRLGLHRTEGELQKIVQAGDKDLDGQLDFEEFVHYLQDHEKKLRLVFKSLDKKNDGRIDAQEIMQSLRDLGVKISEQQAEKILKSMDKNGTMTIDWNEWRDYHLLHPVENIPEIILYWKHSTIFDVGENLTVPDEFTVEERQTGMWWRHLVAGGGAGAVSRTCTAPLDRLKVLMQVHASRSNNMGIVGGFTQMIREGGARSLWRGNGINVLKIAPESAIKFMAYEQIKRLVGSDQETLRIHERLVAGSLAGAIAQSSIYPMEVLKTRMALRKTGQYSGMLDCARRILAREGVAAFYKGYVPNMLGIIPYAGIDLAVYETLKNAWLQHYAVNSADPGVFVLLACGTMSSTCGQLASYPLALVRTRMQAQASIEGAPEVTMSSLFKHILRTEGAFGLYRGLAPNFMKVIPAVSISYVVYENLKITLGVQSR

SEQ ID NO: 255 - DNA, 1548 bp, Homo sapiens
atggtgagcagtgtgttgtgccgctgtgtggcctccccgccgccggacgccgccgccaccgccgcctcttcgtctgcctcatcgccggcgtccgtgggggacccctgcggcggcgctatctgcgggggcccggaccaccggctgcgcctgtggagactctttcagacgctcgacgtcaaccgggacggcggcctgtgtgtcaacgacctggcggtggggctgcggcgcctgggactgcaccgcaccgagggcgagctccagaaaattgtacaagctggagataaggaccttgatgggcagctagactttgaagaatttgtccattatctccaagatcatgagaagaagctgaggctggtgtttaagagtttggacaaaaagaatgatggacgcattgacgcgcaggagatcatgcagtccctgcgggacttgggagtcaagatatctgaacagcaggcagaaaaaattctcaagagaatacgaacgggccatttctggggccctgtcacctacatggataaaaacggcacgatgaccattgactggaacgagtggagagactaccacctcctccaccccgtggaaaacatccccgagatcatcctctactggaagcattccacgatctttgatgtgggtgagaatctaacggtcccggatgagttcacagtggaggagaggcagacggggatgtggtggagacacctggtggcaggaggtggggcaggggccgtatccagaacctgcacggcccccctggacaggctcaaggtgctcatgcaggtccatgcctcccgcagcaacaacatgggcatcgttggtggcttcactcagatgattcgagaaggaggggccaggtcactctggcggggcaatggcatcaacgtcctcaaaattgcccccgaatcagccatcaaattcatggcctatgagcagatcaagcgccttgttggtagtgaccaggagactctgaggattcacgagaggcttgtggcagggtccttggcaggggccatcgcccagagcagcatctacccaatggaggtcctgaagacccggatggcgctgcggaagacaggccagtactcaggaatgctggactgcgccaggaggatcctggccagagagggggtggccgccttctacaaaggctatgtccccaacatgctgggcatcatcccctatgccggcatcgaccttgcagtctacgagacgctcaagaatgcctggctgcagcactatgcagtgaacagcgcggaccccggcgtgtttgtgctcctggcctgtggcaccatgtccagtacctgtggccagctggccagctaccccctggccctagtcaggacccggatgcaggcgcaagcctctattgagggcgctccggaggtgaccatgagcagcctcttcaaacatatcctgcggaccgagggggccttcgggctgtacagggggctggcccccaacttcatgaaggtcatcccagctgtgagcatcagctacgtggtctacgagaacctgaagatcaccctgggcgtgcagtcgcggtga

SEQ ID NO: 256 - protein, 515 aa, Homo sapiens
MVSSVLCRCVASPPPDAAATAASSSASSPASVGDPCGGAICGGPDHRLRLWRLFQTLDVNRDGGLCVNDLAVGLRRLGLHRTEGELQKIVQAGDKDLDGQLDFEEFVHYLQDHEKKLRLVFKSLDKKNDGRIDAQEIMQSLRDLGVKISEQQAEKILKRIRTGHFWGPVTYMDKNGTMTIDWNEWRDYHLLHPVENIPEIILYWKHSTIFDVGENLTVPDEFTVEERQTGMWWRHLVAGGGAGAVSRTCTAPLDRLKVLMQVHASRSNNMGIVGGFTQMIREGGARSLWRGNGINVLKIAPESAIKFMAYEQIKRLVGSDQETLRIHERLVAGSLAGAIAQSSIYPMEVLKTRMALRKTGQYSGMLDCARRILAREGVAAFYKGYVPNMLGIIPYAGIDLAVYETLKNAWLQHYAVNSADPGVFVLLACGTMSSTCGQLASYPLALVRTRMQAQASIEGAPEVTMSSLFKHILRTEGAFGLYRGLAPNFMKVIPAVSISYVVYENLKITLGVQSR

SEQ ID NO: 257 - DNA, 1470 bp, Homo sapiens
atgttgcagatgctgtggcatttcctagctagctttttccccagggctgggtgccacggctccagagagggggacgatcgtgaagtcagaggcaccccagcccctgcctggagagaccagatggcaagctttttggggaaacaggacggaagggctgaggccacggaaaaaagacccaccattttgctggtggttggacctgcagagcagtttcctaagaaaattgtacaagctggagataaggaccttgatgggcagctagactttgaagaatttgtccattatctccaagatcatgagaagaagctgaggctggtgtttaagagtttggacaaaaagaatgatggacgcattgacgcgcaggagatcatgcagtccctgcgggacttgggagtcaagatatctgaacagcaggcagaaaaaattctcaagagcatggataaaaacggcacgatgaccattgactggaacgagtggagagactaccacctcctccaccccgtggaaaacatccccgagatcatcctctactggaagcattccacgatctttgatgtgggtgagaatctaacggtcccggatgagttcacagtggaggagaggcagacggggatgtggtggagacacctggtggcaggaggtggggcaggggccgtatccagaacctgcacggcccccctggacaggctcaaggtgctcatgcaggtccatgcctcccgcagcaacaacatgggcatcgttggtggcttcactcagatgattcgagaaggaggggccaggtcactctggcggggcaatggcatcaacgtcctcaaaattgcccccgaatcagccatcaaattcatggcctatgagcagatcaagcgccttgttggtagtgaccaggagactctgaggattcacgagaggcttgtggcagggtccttggcaggggccatcgcccagagcagcatctacccaatggaggtcctgaagacccggatggcgctgcggaagacaggccagtactcaggaatgctggactgcgccaggaggatcctggccagagagggggtggccgccttctacaaaggctatgtccccaacatgctgggcatcatcccctatgccggcatcgaccttgcagtctacgagacgctcaagaatgcctggctgcagcactatgcagtgaacagcgcggaccccggcgtgtttgtgctcctggcctgtggcaccatgtccagtacctgtggccagctggccagctaccccctggccctagtcaggacccggatgcaggcgcaagcctctattgagggcgctccggaggtgaccatgagcagcctcttcaaacatatcctgcggaccgagggggccttcgggctgtacagggggctggcccccaacttcatgaaggtcatcccagctgtgagcatcagctacgtggtctacgagaacctgaagatcaccctgggcgtgcagtcgcggtga

SEQ ID NO: 258 - protein, 489 aa, Homo sapiens
MLQMLWHFLASFFPRAGCHGSREGDDREVRGTPAPAWRDQMASFLGKQDGRAEATEKRPTILLVVGPAEQFPKKIVQAGDKDLDGQLDFEEFVHYLQDHEKKLRLVFKSLDKKNDGRIDAQEIMQSLRDLGVKISEQQAEKILKSMDKNGTMTIDWNEWRDYHLLHPVENIPEIILYWKHSTIFDVGENLTVPDEFTVEERQTGMWWRHLVAGGGAGAVSRTCTAPLDRLKVLMQVHASRSNNMGIVGGFTQMIREGGARSLWRGNGINVLKIAPESAIKFMAYEQIKRLVGSDQETLRIHERLVAGSLAGAIAQSSIYPMEVLKTRMALRKTGQYSGMLDCARRILAREGVAAFYKGYVPNMLGIIPYAGIDLAVYETLKNAWLQHYAVNSADPGVFVLLACGTMSSTCGQLASYPLALVRTRMQAQASIEGAPEVTMSSLFKHILRTEGAFGLYRGLAPNFMKVIPAVSISYVVYENLKITLGVQSR

SEQ ID NO: 259 - DNA, 1101 bp, Homo sapiens
atgcagtccctgcgggacttgggagtcaagatatctgaacagcaggcagaaaaaattctcaagagcatggataaaaacggcacgatgaccattgactggaacgagtggagagactaccacctcctccaccccgtggaaaacatccccgagatcatcctctactggaagcattccacgatctttgatgtgggtgagaatctaacggtcccggatgagttcacagtggaggagaggcagacggggatgtggtggagacacctggtggcaggaggtggggcaggggccgtatccagaacctgcacggcccccctggacaggctcaaggtgctcatgcaggtccatgcctcccgcagcaacaacatgggcatcgttggtggcttcactcagatgattcgagaaggaggggccaggtcactctggcggggcaatggcatcaacgtcctcaaaattgcccccgaatcagccatcaaattcatggcctatgagcagatcaagcgccttgttggtagtgaccaggagactctgaggattcacgagaggcttgtggcagggtccttggcaggggccatcgcccagagcagcatctacccaatggaggtcctgaagacccggatggcgctgcggaagacaggccagtactcaggaatgctggactgcgccaggaggatcctggccagagagggggtggccgccttctacaaaggctatgtccccaacatgctgggcatcatcccctatgccggcatcgaccttgcagtctacgagacgctcaagaatgcctggctgcagcactatgcagtgaacagcgcggaccccggcgtgtttgtgctcctggcctgtggcaccatgtccagtacctgtggccagctggccagctaccccctggccctagtcaggacccggatgcaggcgcaagcctctattgagggcgctccggaggtgaccatgagcagcctcttcaaacatatcctgcggaccgagggggccttcgggctgtacagggggctggcccccaacttcatgaaggtcatcccagctgtgagcatcagctacgtggtctacgagaacctgaagatcaccctgggcgtgcagtcgcggtga

SEQ ID NO: 260 - protein, 366 aa, Homo sapiens
MQSLRDLGVKISEQQAEKILKSMDKNGTMTIDWNEWRDYHLLHPVENIPEIILYWKHSTIFDVGENLTVPDEFTVEERQTGMWWRHLVAGGGAGAVSRTCTAPLDRLKVLMQVHASRSNNMGIVGGFTQMIREGGARSLWRGNGINVLKIAPESAIKFMAYEQIKRLVGSDQETLRIHERLVAGSLAGAIAQSSIYPMEVLKTRMALRKTGQYSGMLDCARRILAREGVAAFYKGYVPNMLGIIPYAGIDLAVYETLKNAWLQHYAVNSADPGVFVLLACGTMSSTCGQLASYPLALVRTRMQAQASIEGAPEVTMSSLFKHILRTEGAFGLYRGLAPNFMKVIPAVSISYVVYENLKITLGVQSR

SEQ ID NO: 261 - DNA, 496 bp, Homo sapiens
cacagtggaggagaggcagacggggatgtggtggagacacctggtggcaggaggtggggcaggggccgtatccagaacctgcacggcccccctggacaggctcaaggtgctcatgcaggtcctgaagacccggatggcgctgcggaagacaggccagtactcaggaatgctggactgcgccaggaggatcctggccagagagggggtggccgccttctacaaaggctatgtccccaacatgctgggcatcatcccctatgccggcatcgaccttgcagtctacgagacgctcaagaatgcctggctgcagcactatgcagtgaacagcgcggaccccggcgtgtttgtgctcctggcctgtggcaccatgtccagtacctgtggccagctggccagctaccccctggccctagtcaggacccggatgcaggcgcaaggtaaggctggccctggacagtcccctgggaggtcggggggagcggacagaagcatctga

SEQ ID NO: 262 - protein, 165 aa, Homo sapiens
  misc_feature (1)..(1): Xaa can be any naturally occurring amino acid
XTVEERQTGMWWRHLVAGGGAGAVSRTCTAPLDRLKVLMQVLKTRMALRKTGQYSGMLDCARRILAREGVAAFYKGYVPNMLGIIPYAGIDLAVYETLKNAWLQHYAVNSADPGVFVLLACGTMSSTCGQLASYPLALVRTRMQAQGKAGPGQSPGRSGGADRSI

SEQ ID NO: 263 - DNA, 987 bp, Homo sapiens
atgctgggctcgcgagccgcggggttcgcgcggggcctgcgggctgtggcactggcgtggctgccgggctggcggggccgctccttcgccctggcgcgtgcggcaggcgcgccccacggtggtgacttgcagccccccgcctgtcccgagccgcgcgggcgccagctcagtttgtccgcggcggcggtggtggactctgcgccccgccccctgcagccgtacttgcgcctcatgcggttggacaagcccattggaacctggcttctgtatttaccatgtacctggagcattggtttggcagctgaaccaggttgttttccagattggtacatgctctccctctttggcactggagctattctgatgcgtggagcaggctgtactattaatgacatgtgggaccaggactatgataaaaaggttacaagaacagccaatcgtccaatagccgctggagacatttcaacttttcagtcctttgtttttcttgggggacagctaaccctggcactgggtgttcttctgtgtctaaattactacagtatagctctgggagcaggatccttacttcttgtcatcacctacccactaatgaaaagaatttcatactggcctcaactagccttgggcttgacatttaattggggagcgttacttggatggtctgctatcaagggttcctgtgatccatctgtttgcctgcctctttatttttctggagttatgtggacactaatatatgatactatttatgcccatcaggacaaaagagatgatgttttgattggtcttaagtcaacggctctgcggttcggagaaaataccaagccgtggctcagcggcttcagtgttgcaatgctgggggcactgagcctagtgggtgtgaacagtggacagactgctccctactacgctgccctgggtgctgtaggagcccatctgactcaccagaaatggggtcttgagattttgcccaggctggtctga

SEQ ID NO: 264 - protein, 328 aa, Homo sapiens
MLGSRAAGFARGLRAVALAWLPGWRGRSFALARAAGAPHGGDLQPPACPEPRGRQLSLSAAAVVDSAPRPLQPYLRLMRLDKPIGTWLLYLPCTWSIGLAAEPGCFPDWYMLSLFGTGAILMRGAGCTINDMWDQDYDKKVTRTANRPIAAGDISTFQSFVFLGGQLTLALGVLLCLNYYSIALGAGSLLLVITYPLMKRISYWPQLALGLTFNWGALLGWSAIKGSCDPSVCLPLYFSGVMWTLIYDTIYAHQDKRDDVLIGLKSTALRFGENTKPWLSGFSVAMLGALSLVGVNSGQTAPYYAALGAVGAHLTHQKWGLEILPRLV

SEQ ID NO: 265 - DNA, 1266 bp, Homo sapiens
atgaccccaatttcacaagtaaggatgaggaaaggttctgcccacaccgccgcccagcctggcagactaggattgcatcctgcgggtgccactgcgcatgcctgccggggaatgacgtcaatccgagctcgtcccggcctcaccagcgccatgctgggctcgcgagccgcggggttcgcgcggggcctgcgggctgtggcactggcgtggctgccgggctggcggggccgctccttcgccctggcgcgtgcggcaggcgcgccccacggtggtgacttgcagccccccgcctgtcccgagccgcgcgggcgccagctcagtttgtccgcggcggcggtggtggactctgcgccccgccccctgcagccgtacttgcgcctcatgcggttggacaagcccattggaacctggcttctgtatttaccatgtacctggagcattggtttggcagctgaaccaggttgttttccagattggtacatgctctccctctttggcactggagctattctgatgcgtggagcaggctgtactattaatgacatgtgggaccaggactatgataaaaaggttacaagaacagccaatcgtccaatagccgctggagacatttcaacttttcagtcctttgtttttcttgggggacagctaaccctggcactgggtgttcttctgtgtctaaattactacagtatagctctgggagcaggatccttacttcttgtcatcacctacccactaatgaaaagaatttcatactggcctcaactagccttgggcttgacatttaattggggagcgttacttggatggtctgctatcaagggttcctgtgatccatctgtttgcctgcctctttatttttctggagttatgtggacactaatatatgatactatttatgcccatcaggacaaaagagatgatgttttgattggtcttaagtcaacggctctgcggttcggagaaaataccaagccgtggctcagcggcttcagtgttgcaatgctgggggcactgagcctagtgggtgtgaacagtggacagactgctccctactacgctgccctgggtgctgtaggagcccatctgactcaccagatttacactctagacatccacagacctgaggattgttggaataaatttatctccaaccgaacactgggactaatagtttttttagggattgtccttgggaatttgtggaaagaaaagaagacagacaaaacaaagaagggtatagagaataaaatagaaaattaa

SEQ ID NO: 266 - protein, 421 aa, Homo sapiens
MTPISQVRMRKGSAHTAAQPGRLGLHPAGATAHACRGMTSIRARPGLTSAMLGSRAAGFARGLRAVALAWLPGWRGRSFALARAAGAPHGGDLQPPACPEPRGRQLSLSAAAVVDSAPRPLQPYLRLMRLDKPIGTWLLYLPCTWSIGLAAEPGCFPDWYMLSLFGTGAILMRGAGCTINDMWDQDYDKKVTRTANRPIAAGDISTFQSFVFLGGQLTLALGVLLCLNYYSIALGAGSLLLVITYPLMKRISYWPQLALGLTFNWGALLGWSAIKGSCDPSVCLPLYFSGVMWTLIYDTIYAHQDKRDDVLIGLKSTALRFGENTKPWLSGFSVAMLGALSLVGVNSGQTAPYYAALGAVGAHLTHQIYTLDIHRPEDCWNKFISNRTLGLIVFLGIVLGNLWKEKKTDKTKKGIENKIEN

SEQ ID NO: 267 - DNA, 1155 bp, Homo sapiens
atgacgtcaatccgagctcgtcccggcctcaccagcgccatgctgggctcgcgagccgcggggttcgcgcggggcctgcgggctgtggcactggcgtggctgccgggctggcggggccgctccttcgccctggcgcgtgcggcaggcgcgccccacggtggtgacttgcagccccccgcctgtcccgagccgcgcgggcgccagctcagtttgtccgcggcggcggtggtggactctgcgccccgccccctgcagccgtacttgcgcctcatgcggttggacaagcccattggaacctggcttctgtatttaccatgtacctggagcattggtttggcagctgaaccaggttgttttccagattggtacatgctctccctctttggcactggagctattctgatgcgtggagcaggctgtactattaatgacatgtgggaccaggactatgataaaaaggttacaagaacagccaatcgtccaatagccgctggagacatttcaacttttcagtcctttgtttttcttgggggacagctaaccctggcactgggtgttcttctgtgtctaaattactacagtatagctctgggagcaggatccttacttcttgtcatcacctacccactaatgaaaagaatttcatactggcctcaactagccttgggcttgacatttaattggggagcgttacttggatggtctgctatcaagggttcctgtgatccatctgtttgcctgcctctttatttttctggagttatgtggacactaatatatgatactatttatgcccatcaggacaaaagagatgatgttttgattggtcttaagtcaacggctctgcggttcggagaaaataccaagccgtggctcagcggcttcagtgttgcaatgctgggggcactgagcctagtgggtgtgaacagtggacagactgctccctactacgctgccctgggtgctgtaggagcccatctgactcaccagatttacactctagacatccacagacctgaggattgttggaataaatttatctccaaccgaacactgggactaatagtttttttagggattgtccttgggaatttgtggaaagaaaagaagacagacaaaacaaagaagggtatagagaataaaatagaaaattaa

SEQ ID NO: 268 - protein, 384 aa, Homo sapiens
MTSIRARPGLTSAMLGSRAAGFARGLRAVALAWLPGWRGRSFALARAAGAPHGGDLQPPACPEPRGRQLSLSAAAVVDSAPRPLQPYLRLMRLDKPIGTWLLYLPCTWSIGLAAEPGCFPDWYMLSLFGTGAILMRGAGCTINDMWDQDYDKKVTRTANRPIAAGDISTFQSFVFLGGQLTLALGVLLCLNYYSIALGAGSLLLVITYPLMKRISYWPQLALGLTFNWGALLGWSAIKGSCDPSVCLPLYFSGVMWTLIYDTIYAHQDKRDDVLIGLKSTALRFGENTKPWLSGFSVAMLGALSLVGVNSGQTAPYYAALGAVGAHLTHQIYTLDIHRPEDCWNKFISNRTLGLIVFLGIVLGNLWKEKKTDKTKKGIENKIEN

SEQ ID NO: 269 - DNA, 795 bp, Homo sapiens
atgtccgactcgtgggtcccgaactccgcctcgggccaggacccagggggccgccggagggcctgggccgagctgctggcgggaagggtcaagagggaaaaatataatcctgaaagggcacagaaattaaaggaatcagctgtgcgcctcctgcgaagccatcaggacctgaatgcccttttgcttgaggtagaaggtccactgtgtaaaaaattgtctctcagcaaagtgattgactgtgacagttctgaggcctatgctaatcattctagttcatttataggctctgctttgcaggatcaagcctcaaggctgggggttcccgtgggtattctctcagccgggatggttgcctctagcgtgggacagatctgcacggctccagcggagaccagtcaccctgtgctgctgactgtggagcagagaagttctttgttgcttgaagcggtgtggcatcttcacgtacaaggcattgtgagcctgcaagagctgctggaaagccatcccgacatgcatgctgtgggatcgtggctcttcaggaatctgtgctgcctttgtgaacagatggaagcatcctgccagcatgctgacgtcgccagggccatgctttctgattttgttcaaatgtttgttttgaggggatttcagaaaaactcagatctgagaagaactgtggagcctgaaaaaatgccgcaggtcacggttgatgtactgcagagaatgctgatttttgcacttgacgctttggctgctggagtacaggaggagtcctccactcacaagatcgtgaggtgc

SEQ ID NO: 270 - protein, 265 aa, Homo sapiens
MSDSWVPNSASGQDPGGRRRAWAELLAGRVKREKYNPERAQKLKESAVRLLRSHQDLNALLLEVEGPLCKKLSLSKVIDCDSSEAYANHSSSFIGSALQDQASRLGVPVGILSAGMVASSVGQICTAPAETSHPVLLTVEQRSSLLLEAVWHLHVQGIVSLQELLESHPDMHAVGSWLFRNLCCLCEQMEASCQHADVARAMLSDFVQMFVLRGFQKNSDLRRTVEPEKMPQVTVDVLQRMLIFALDALAAGVQEESSTHKIVRC

SEQ ID NO: 271 - DNA, 4368 bp, Homo sapiens
atgtccgactcgtgggtcccgaactccgcctcgggccaggacccagggggccgccggagggcctgggccgagctgctggcgggaagggtcaagagggaaaaatataatcctgaaagggcacagaaattaaaggaatcagctgtgcgcctcctgcgaagccatcaggacctgaatgcccttttgcttgaggtagaaggtccactgtgtaaaaaattgtctctcagcaaagtgattgactgtgacagttctgaggcctatgctaatcattctagttcatttataggctctgctttgcaggatcaagcctcaaggctgggggttcccgtgggtattctctcagccgggatggttgcctctagcgtgggacagatctgcacggctccagcggagaccagtcaccctgtgctgctgactgtggagcagagaaagaagctgtcttccctgttagagtttgctcagtatttattggcacacagtatgttctcccgtctttccttctgtcaagaattatggaaaatacagagttctttgttgcttgaagcggtgtggcatcttcacgtacaaggcattgtgagcctgcaagagctgctggaaagccatcccgacatgcatgctgtgggatcgtggctcttcaggaatctgtgctgcctttgtgaacagatggaagcatcctgccagcatgctgacgtcgccagggccatgctttctgattttgttcaaatgtttgttttgaggggatttcagaaaaactcagatctgagaagaactgtggagcctgaaaaaatgccgcaggtcacggttgatgtactgcagagaatgctgatttttgcacttgacgctttggctgctggagtacaggaggagtcctccactcacaagatcgtgaggtgctggttcggagtgttcagtggacacacgcttggcagtgtaatttccacagatcctctgaagaggttcttcagtcataccctgactcagatactcactcacagccctgtgctgaaagcatctgatgctgttcagatgcagagagagtggagctttgcgcggacacaccctctgctcacctcactgtaccgcaggctctttgtgatgctgagtgcagaggagttggttggccatttgcaagaagttctggaaacgcaggaggttcactggcagagagtgctctcctttgtgtctgccctggttgtctgctttccagaagcgcagcagctgcttgaagactgggtggcgcgtttgatggcccaggcattcgagagctgccagctggacagcatggtcactgcgttcctggttgtgcgccaggcagcactggagggcccctctgcgttcctgtcatatgcagactggttcaaggcctcctttgggagcacacgaggctaccatggctgcagcaagaaggccctggtcttcctgtttacgttcttgtcagaactcgtgccttttgagtctccccggtacctgcaggtgcacattctccacccacccctggttcccggcaagtaccgctccctcctcacagactacatctcattggccaagacacggctggccgacctcaaggtttctatagaaaacatgggactctacgaggatttgtcatcagctggggacattactgagccccacagccaagctcttcaggatgttgaaaaggccatcatggtgtttgagcatacggggaacatcccagtcaccgtcatggaggccagcatattcaggaggccttactacgtgtcccacttcctccccgccctgctcacacctcgagtgctccccaaagtccctgactcccgtgtggcgtttatagagtctctgaagagagcagataaaatccccccatctctgtactccacctactgccaggcctgctctgctgctgaagagaagccagaagatgcagccctgggagtgagggcagaacccaactctgctgaggagcccctgggacagctcacagctgcactgggagagctgagagcctccatgacagaccccagccagcgtgatgttatatcggcacaggtggcagtgatttctgaaagactgagggctgtcctgggccacaatgaggatgacagcagcgttgagatatcaaagattcagctcagcatcaacacgccgagactggagccacgggaacacatggctgtggacctcctgctgacgtctttctgtcagaacctgatggctgcctccagtgtcgctcccccggagaggcagggtccctgggctgccctcttcgtgaggaccatgtgtggacgtgtgctccctgcagtgctcacccggctctgccagctgctccgtcaccagggcccgagcctgagtgccccacatgtgctggggttggctgccctggccgtgcacctgggtgagtccaggtctgcgctcccagaggtggatgtgggtcctcctgcacctggtgctggccttcctgtccctgcgctctttgacagcctcctgacctgtaggacgagggattccttgttcttctgcctgaaattttgtacagcagcaatttcttactctctctgcaagttttcttcccagtcacgagatactttgtgcagctgcttatctccaggccttattaaaaagtttcagttcctcatgttcagattgttctcagaggcccgacagcctctttctgaggaggacgtagccagcctttcctggagacccttgcaccttccttctgcagactggcagagagctgccctctctctctggacacacagaaccttccgagaggtgttgaaagaggaagatgttcacttaacttaccaagactggttacacctggagctggaaattcaacctgaagctgatgctctttcagatactgaacggcaggacttccaccagtgggcgatccatgagcactttctccctgagtcctcggcttcagggggctgtgacggagacctgcaggctgcgtgtaccattcttgtcaacgcactgatggatttccaccaaagctcaaggagttatgaccactcagaaaattctgatttggtctttggtggccgcacaggaaatgaggatattatttccagattgcaggagatggtagctgacctggagctgcagcaagacctcatagtgcctctcggccacaccccttcccaggagcacttcctctttgagattttccgcagacggctccaggctctgacaagcgggtggagcgtggctgccagccttcagagacagagggagctgctaatgtacaaacggatcctcctccgcctgccttcgtctgtcctctgcggcagcagcttccaggcagaacagcccatcactgccagatgcgagcagttcttccacttggtcaactctgagatgagaaacttctgctcccacggaggtgccctgacacaggacatcactgcccacttcttcaggggcctcctgaacgcctgtctgcggagcagagacccctccctgatggtcgacttcatactggccaagtgccagacgaaatgccccttaattttgacctctgctctggtgtggtggccgagcctggagcctgtgctgctctgccggtggaggagacactgccagagcccgctgccccgggaactgcagaagctacaagaaggccggcagtttgccagcgatttcctctcccctgaggctgcctccccagcacccaacccggactggctctcagctgctgcactgcactttgcgattcaacaagtcagggaagaaaacatcaggaagcagctaaagaagctggactgcgagagagaggagctattggttttccttttcttcttctccttgatgggcctgctgtcgtcacatctgacctcaaatagcaccacagacctgccaaaggctttccacgtttgtgcagcaatcctcgagtgtttagagaagaggaagatatcctggctggcactctttcagttgacagagagtgacctcaggctggggcggctcctcctccgtgtggccccggatcagcacaccaggctgctgcctttcgctttttacagtcttctctcctacttccatgaagacgcggccatcagggaagaggccttcctgcatgttgctgtggacatgtacttgaagctggtccagctcttcgtggctggggatacaagcacagtttcacctccagctggcaggagcctggagctcaagggtcagggcaaccccgtggaactgataacaaaagctcgtctttttctgctgcagttaatacctcggtgcccgaaaaagagcttctcacacgtggcagagctgctggctgatcgtggggactgcgacccagaggtgagcgccgccctccagagcagacagcaggctgcccctgacgctgacctgtcccaggagcctcatctcttctga

SEQ ID NO: 272 - protein, 1455 aa, Homo sapiens
MSDSWVPNSASGQDPGGRRRAWAELLAGRVKREKYNPERAQKLKESAVRLLRSHQDLNALLLEVEGPLCKKLSLSKVIDCDSSEAYANHSSSFIGSALQDQASRLGVPVGILSAGMVASSVGQICTAPAETSHPVLLTVEQRKKLSSLLEFAQYLLAHSMFSRLSFCQELWKIQSSLLLEAVWHLHVQGIVSLQELLESHPDMHAVGSWLFRNLCCLCEQMEASCQHADVARAMLSDFVQMFVLRGFQKNSDLRRTVEPEKMPQVTVDVLQRMLIFALDALAAGVQEESSTHKIVRCWFGVFSGHTLGSVISTDPLKRFFSHTLTQILTHSPVLKASDAVQMQREWSFARTHPLLTSLYRRLFVMLSAEELVGHLQEVLETQEVHWQRVLSFVSALVVCFPEAQQLLEDWVARLMAQAFESCQLDSMVTAFLVVRQAALEGPSAFLSYADWFKASFGSTRGYHGCSKKALVFLFTFLSELVPFESPRYLQVHILHPPLVPGKYRSLLTDYISLAKTRLADLKVSIENMGLYEDLSSAGDITEPHSQALQDVEKAIMVFEHTGNIPVTVMEASIFRRPYYVSHFLPALLTPRVLPKVPDSRVAFIESLKRADKIPPSLYSTYCQACSAAEEKPEDAALGVRAEPNSAEEPLGQLTAALGELRASMTDPSQRDVISAQVAVISERLRAVLGHNEDDSSVEISKIQLSINTPRLEPREHMAVDLLLTSFCQNLMAASSVAPPERQGPWAALFVRTMCGRVLPAVLTRLCQLLRHQGPSLSAPHVLGLAALAVHLGESRSALPEVDVGPPAPGAGLPVPALFDSLLTCRTRDSLFFCLKFCTAAISYSLCKFSSQSRDTLCSCLSPGLIKKFQFLMFRLFSEARQPLSEEDVASLSWRPLHLPSADWQRAALSLWTHRTFREVLKEEDVHLTYQDWLHLELEIQPEADALSDTERQDFHQWAIHEHFLPESSASGGCDGDLQAACTILVNALMDFHQSSRSYDHSENSDLVFGGRTGNEDIISRLQEMVADLELQQDLIVPLGHTPSQEHFLFEIFRRRLQALTSGWSVAASLQRQRELLMYKRILLRLPSSVLCGSSFQAEQPITARCEQFFHLVNSEMRNFCSHGGALTQDITAHFFRGLLNACLRSRDPSLMVDFILAKCQTKCPLILTSALVWWPSLEPVLLCRWRRHCQSPLPRELQKLQEGRQFASDFLSPEAASPAPNPDWLSAAALHFAIQQVREENIRKQLKKLDCEREELLVFLFFFSLMGLLSSHLTSNSTTDLPKAFHVCAAILECLEKRKISWLALFQLTESDLRLGRLLLRVAPDQHTRLLPFAFYSLLSYFHEDAAIREEAFLHVAVDMYLKLVQLFVAGDTSTVSPPAGRSLELKGQGNPVELITKARLFLLQLIPRCPKKSFSHVAELLADRGDCDPEVSAALQSRQQAAPDADLSQEPHLF

SEQ ID NO: 273 - DNA, 2559 bp, Homo sapiens; identical to SEQ ID NO: 141

SEQ ID NO: 274 - protein, 852 aa, Homo sapiens; identical to SEQ ID NO: 142

SEQ ID NO: 275 - DNA, 1479 bp, Homo sapiens; identical to SEQ ID NO: 143

SEQ ID NO: 276 - protein, 493 aa, Homo sapiens; identical to SEQ ID NO: 144

SEQ ID NO: 277 - DNA, 3360 bp, Homo sapiens
gcagcggaggaaagaggatggcgacctcgtcgatgccggagtcagagaggaacgtggctacgaaagcctcggagtgaagttcccagaccctacgccccgctgtcaggcagcccgccgatcagatggaggagaacgaggtggagagcagcagcgacgcggcccctgggcctggccggcccgaggagccctctgagagcggcctgggtgtgggcacctagccgtgtccgccgacagcagcgacgccgcggccgccccggggcaggcagaggcattgatgacctggaggaggatagcgactataatccagctgaggatgagccccgaggccggcagcttcggctccagcgccccacccccagtaccccaaggccccgaaggagacctggccggccccggaagctgccccgcctggagatctcagacctcccagatggtgtggaaggagagcctctagtgagttcccagagtggacagagccctccagagccacaggatcccgaggctcccagctcctcaggcccaggacacctggtggccatgggcaaggtgagcaggacccctgtggaagctggtgtgagccagtcagatgcagagaacgcagccccctcctgcccggatgagcatgacactctgccccggcgccgaggtcgaccttccaggcgcttcctaggcaagaaataccgcaagtactattacaagtcgcccaaaccacttttgaggcccttcctgtgccgcatctgtggttctcgctttctgtcccacgaggacctgcgcttccacgtcaactcccatgaggctggcgatccccagctcttcaagtgcctgcagtgcagctatcgttcccgccgctggtcctcgctcaaggagcacatgttcaaccacgtgggcagcaagccctacaagtgtgacgagtgcagctacaccagtgtctaccggaaggacgtcattcggcacgccgctgtgcacagccgggaccggaagaagaggccagatccgactccaaagctgagctctttcccctgccctgtgtgtggccgtgtgtaccccatgcagaaaagactcacgcagcacatgaagacgcacagcactgagaagccccacatgtgtgacaagtgtggaaagtcctttaagaagcgctacaccttcaaaatgcacctgctcacgcacatccaggctgttgccaaccgcaggttcaagtgtgagttctgtgagtttgtttgtgaagacaagaaggcactgctgaaccaccagttgtcccacgtcagtgacaagcccttcaaatgcagcttttgtccctaccgcaccttccgagaggacttcttgctgtcccatgtggctgtcaagcacacaggggccaagcccttcgcctgtgagtactgccacttcagcacacggcacaagaagaacctgcgcctgcacgtacggtgccgacacgcaagcagcttcgaggaatgggggaggcgccaccctgaggagcccccctcccgccgtcgccccttcttctctctgcagcagattgaggagctgaagcagcagcacagtgcggcccctggaccacctcccagttccccaggacctcctgagatacccccagaggcgacaactttccagtcatctgaggctccctcattgctctgttctgacaccctgggcggcgccaccatcatctaccagcaaggagctgaggagtcgacagcgatggccacgcagacagccttggatcttctgctgaacatgagtgctcagcgggaactggggggcacagccctgcaggtggctgtggtgaagtcggaagatgtggaagcagggttagcatcccctggtgggcagccctcccctgaaggtgccactccacaggtggtcaccctccacgtggcagagccagggggcggtgcagcagccgagagccagctaggccctcctgacctaccgcagatcaccctggcacctggtccatttggtgggactggctacagtgtcatcacagcaccccctatggaggagggaacatcagctcctggcacaccttacagcgaggagcccgcaggagaggcagcccaggctgtggttgtgagtgacaccctaaaagaagctggcacccactacatcatggctactgatggtacccagttgcaccacattgagctcaccgcagatggctccatctccttcccaagtccagatgctctggcctctggtgccaaatggcccctgctgcagtgtgggggactgcccagagacggccctgagcccccatctccagccaagacccactgcgtaggggactcccagagctctgcctcctcacctcctgcaaccagcaaagccctgggcctggcagtgcccccgtcaccgccatctgcagccactgctgcatcaaagaagttttcctgcaagatctgtgccgaggccttccctggccgagctgagatggagagtcacaagcgggcccacgctgggcctggtgccttcaagtgccccgactgccccttcagtgcccgccagtggcccgaggtccgggcgcacatggcacagcactcaagcctacggccccaccagtgtagccagtgcagctttgcctccaagaacaagaaggacctgcgtcggcacatgctgactcacacaaaggagaagccttttgcatgccacctctgcgggcagcgtttcaaccgtaacgggcacctcaagttccacatccagcggctgcacagtcctgatgggaggaagtcaggaacccctacagcccgggcccctacccagaccccaacccagaccatcatcctgaacagtgatgacgaaacactggccaccctgcacactgcactccagtccagtcacggggtcctgggcccagagcggctacagcaggcactgagccaggaacacatcatcgttgcccaggaacagacagtgaccaatcaggaggaagccgcctacatccaagagatcaccacggcagatggccagaccgtacagcacctggtgacctccgacaaccaggtgcagtatatcatctcccaggatggtgtccagcacctgctcccccaggaatatgttgtggtccctgaaggccatcacatccaggtacaggagggccagatcacacacatccagtatgaacaaggagccccgttccttcaggagtcccagatccagtatgtgcctgtgtccccaggccagcagcttgtcacacaggctcaacttgaggctgcagcacactcagctgtcacagcagtggctgatgctgccatggcccaagcccagggcctgtttggtacagacgagacagtgcccgaacacattcaacagctgcagcaccagggcatcgagtacgacgtcatcaccctggccgatgactga

SEQ ID NO: 278 - protein, 1119 aa, Homo sapiens
AAEERGWRPRRCRSQRGTWLRKPRSEVPRPYAPLSGSPPIRWRRTRWRAAATRPLGLAGPRSPLRAAWVWAPSRVRRQQRRRGRPGAGRGIDDLEEDSDYNPAEDEPRGRQLRLQRPTPSTPRPRRRPGRPRKLPRLEISDLPDGVEGEPLVSSQSGQSPPEPQDPEAPSSSGPGHLVAMGKVSRTPVEAGVSQSDAENAAPSCPDEHDTLPRRRGRPSRRFLGKKYRKYYYKSPKPLLRPFLCRICGSRFLSHEDLRFHVNSHEAGDPQLFKCLQCSYRSRRWSSLKEHMFNHVGSKPYKCDECSYTSVYRKDVIRHAAVHSRDRKKRPDPTPKLSSFPCPVCGRVYPMQKRLTQHMKTHSTEKPHMCDKCGKSFKKRYTFKMHLLTHIQAVANRRFKCEFCEFVCEDKKALLNHQLSHVSDKPFKCSFCPYRTFREDFLLSHVAVKHTGAKPFACEYCHFSTRHKKNLRLHVRCRHASSFEEWGRRHPEEPPSRRRPFFSLQQIEELKQQHSAAPGPPPSSPGPPEIPPEATTFQSSEAPSLLCSDTLGGATIIYQQGAEESTAMATQTALDLLLNMSAQRELGGTALQVAVVKSEDVEAGLASPGGQPSPEGATPQVVTLHVAEPGGGAAAESQLGPPDLPQITLAPGPFGGTGYSVITAPPMEEGTSAPGTPYSEEPAGEAAQAVVVSDTLKEAGTHYIMATDGTQLHHIELTADGSISFPSPDALASGAKWPLLQCGGLPRDGPEPPSPAKTHCVGDSQSSASSPPATSKALGLAVPPSPPSAATAASKKFSCKICAEAFPGRAEMESHKRAHAGPGAFKCPDCPFSARQWPEVRAHMAQHSSLRPHQCSQCSFASKNKKDLRRHMLTHTKEKPFACHLCGQRFNRNGHLKFHIQRLHSPDGRKSGTPTARAPTQTPTQTIILNSDDETLATLHTALQSSHGVLGPERLQQALSQEHIIVAQEQTVTNQEEAAYIQEITTADGQTVQHLVTSDNQVQYIISQDGVQHLLPQEYVVVPEGHHIQVQEGQITHIQYEQGAPFLQESQIQYVPVSPGQQLVTQAQLEAAAHSAVTAVADAAMAQAQGLFGTDETVPEHIQQLQHQGIEYDVITLADD

SEQ ID NO: 279 - DNA, 4029 bp, Homo sapiens
atggaggagaacgaggtggagagcagcagcgacgcggcccctgggcctggccggcccgaggagccctctgagagcggcctgggtgtgggcacctcagaagccgtgtccgccgacagcagcgacgccgcggccgccccggggcaggcagaggccgatgactctggcgtggggcaaagctcggaccgcggcagccgttctcaggaggaggtatctgagagcagctcgagcgcagaccccctgcctaatagctacctccctgattcatcgtctgtgtctcatgggccagtggcaggggtgacaggcggtcccccagcacttgtgcactctagtgcactcccagaccccaacatgctggtgtccgactgcacagcttcctcctcggacctgggctcggccatcgacaagatcatcgagtccaccatcgggcccgacctcatccagaactgcatcactgtgaccagtgctgaggatggcggggccgagaccacacggtacctgatcctacagggcccagatgatggagcccccatgacatcaccaatgtccagttccaccttggcccacagcctagcagccattgaggccctggcagatggccccacatccacatccacatgcctggaggcacagggtgggcccagctccccggtgcagctgcccccagcctccggtgccgaagagccggacctgcagagcctggaggccatgatggaggtggtggtggtgcagcagttcaaatgcaagatgtgccagtaccggagcagcaccaaggccacactgctgcgccacatgcgggaacgccacttccgtccagtagcagcagccgcagcagcagctggtaaaaaaggacgtctacggaagtggagcacctccaccaagagccaagaggaagagggaccagaggaggaggacgatgatgacattgtagacgctggagccattgatgacctggaggaggatagcgactataatccagctgaggatgagccccgaggccggcagcttcggctccagcgccccacccccagtaccccaaggccccgaaggagacctggccggccccggaagctgccccgcctggagatctcagacctcccagatggtgtggaaggagagcctctagtgagttcccagagtggacagagccctccagagccacaggatcccgaggctcccagctcctcaggcccaggacacctggtggccatgggcaaggtgagcaggacccctgtggaagctggtgtgagccagtcagatgcagagaacgcagccccctcctgcccggatgagcatgacactctgccccggcgccgaggtcgaccttccaggcgcttcctaggcaagaaataccgcaagtactattacaagtcgcccaaaccacttttgaggcccttcctgtgccgcatctgtggttctcgctttctgtcccacgaggacctgcgcttccacgtcaactcccatgaggctggcgatccccagctcttcaagtgcctgcagtgcagctatcgttcccgccgctggtcctcgctcaaggagcacatgttcaaccacgtgggcagcaagccctacaagtgtgacgagtgcagctacaccagtgtctaccggaaggacgtcattcggcacgccgctgtgcacagccgggaccggaagaagaggccagatccgactccaaagctgagctctttcccctgccctgtgtgtggccgtgtgtaccccatgcagaaaagactcacgcagcacatgaagacgcacagcactgagaagccccacatgtgtgacaagtgtggaaagtcctttaagaagcgctacaccttcaaaatgcacctgctcacgcacatccaggctgttgccaaccgcaggttcaagtgtgagttctgtgagtttgtttgtgaagacaagaaggcactgctgaaccaccagttgtcccacgtcagtgacaagcccttcaaatgcagcttttgtccctaccgcaccttccgagaggacttcttgctgtcccatgtggctgtcaagcacacaggggccaagcccttcgcctgtgagtactgccacttcagcacacggcacaagaagaacctgcgcctgcacgtacggtgccgacacgcaagcagcttcgaggaatgggggaggcgccaccctgaggagcccccctcccgccgtcgccccttcttctctctgcagcagattgaggagctgaagcagcagcacagtgcggcccctggaccacctcccagttccccaggacctcctgagatacccccagaggcgacaactttccagtcatctgaggctccctcattgctctgttctgacaccctgggcggcgccaccatcatctaccagcaaggagctgaggagtcgacagcgatggccacgcagacagccttggatcttctgctgaacatgagtgctcagcgggaactggggggcacagccctgcaggtggctgtggtgaagtcggaagatgtggaagcagggttagcatcccctggtgggcagccctcccctgaaggtgccactccacaggtggtcaccctccacgtggcagagccagggggcggtgcagcagccgagagccagctaggccctcctgacctaccgcagatcaccctggcacctggtccatttggtgggactggctacagtgtcatcacagcaccccctatggaggagggaacatcagctcctggcacaccttacagcgaggagcccgcaggagaggcagcccaggctgtggttgtgagtgacaccctaaaagaagctggcacccactacatcatggctactgatggtacccagttgcaccacattgagctcaccgcagatggctccatctccttcccaagtccagatgctctggcctctggtgccaaatggcccctgctgcagtgtgggggactgcccagagacggccctgagcccccatctccagccaagacccactgcgtaggggactcccagagctctgcctcctcacctcctgcaaccagcaaagccctgggcctggcagtgcccccgtcaccgccatctgcagccactgctgcatcaaagaagttttcctgcaagatctgtgccgaggccttccctggccgagctgagatggagagtcacaagcgggcccacgctgggcctggtgccttcaagtgccccgactgccccttcagtgcccgccagtggcccgaggtccgggcgcacatggcacagcactcaagcctacggccccaccagtgtagccagtgcagctttgcctccaagaacaagaaggacctgcgtcggcacatgctgactcacacaaaggagaagccttttgcatgccacctctgcgggcagcgtttcaaccgtaacgggcacctcaagttccacatccagcggctgcacagtcctgatgggaggaagtcaggaacccctacagcccgggcccctacccagaccccaacccagaccatcatcctgaacagtgatgacgaaacactggccaccctgcacactgcactccagtccagtcacggggtcctgggcccagagcggctacagcaggcactgagccaggaacacatcatcgttgcccaggaacagacagtgaccaatcaggaggaagccgcctacatccaagagatcaccacggcagatggccagaccgtacagcacctggtgacctccgacaaccaggtgcagtatatcatctcccaggatggtgtccagcacctgctcccccaggaatatgttgtggtccctgaaggccatcacatccaggtacaggagggccagatcacacacatccagtatgaacaaggagccccgttccttcaggagtcccagatccagtatgtgcctgtgtccccaggccagcagcttgtcacacaggctcaacttgaggctgcagcacactcagctgtcacagcagtggctgatgctgccatggcccaagcccagggcctgtttggtacagacgagacagtgcccgaacacattcaacagctgcagcaccagggcatcgagtacgacgtcatcaccctggccgatgactga

SEQ ID NO: 280 - protein, 1342 aa, Homo sapiens
MEENEVESSSDAAPGPGRPEEPSESGLGVGTSEAVSADSSDAAAAPGQAEADDSGVGQSSDRGSRSQEEVSESSSSADPLPNSYLPDSSSVSHGPVAGVTGGPPALVHSSALPDPNMLVSDCTASSSDLGSAIDKIIESTIGPDLIQNCITVTSAEDGGAETTRYLILQGPDDGAPMTSPMSSSTLAHSLAAIEALADGPTSTSTCLEAQGGPSSPVQLPPASGAEEPDLQSLEAMMEVVVVQQFKCKMCQYRSSTKATLLRHMRERHFRPVAAAAAAAGKKGRLRKWSTSTKSQEEEGPEEEDDDDIVDAGAIDDLEEDSDYNPAEDEPRGRQLRLQRPTPSTPRPRRRPGRPRKLPRLEISDLPDGVEGEPLVSSQSGQSPPEPQDPEAPSSSGPGHLVAMGKVSRTPVEAGVSQSDAENAAPSCPDEHDTLPRRRGRPSRRFLGKKYRKYYYKSPKPLLRPFLCRICGSRFLSHEDLRFHVNSHEAGDPQLFKCLQCSYRSRRWSSLKEHMFNHVGSKPYKCDECSYTSVYRKDVIRHAAVHSRDRKKRPDPTPKLSSFPCPVCGRVYPMQKRLTQHMKTHSTEKPHMCDKCGKSFKKRYTFKMHLLTHIQAVANRRFKCEFCEFVCEDKKALLNHQLSHVSDKPFKCSFCPYRTFREDFLLSHVAVKHTGAKPFACEYCHFSTRHKKNLRLHVRCRHASSFEEWGRRHPEEPPSRRRPFFSLQQIEELKQQHSAAPGPPPSSPGPPEIPPEATTFQSSEAPSLLCSDTLGGATIIYQQGAEESTAMATQTALDLLLNMSAQRELGGTALQVAVVKSEDVEAGLASPGGQPSPEGATPQVVTLHVAEPGGGAAAESQLGPPDLPQITLAPGPFGGTGYSVITAPPMEEGTSAPGTPYSEEPAGEAAQAVVVSDTLKEAGTHYIMATDGTQLHHIELTADGSISFPSPDALASGAKWPLLQCGGLPRDGPEPPSPAKTHCVGDSQSSASSPPATSKALGLAVPPSPPSAATAASKKFSCKICAEAFPGRAEMESHKRAHAGPGAFKCPDCPFSARQWPEVRAHMAQHSSLRPHQCSQCSFASKNKKDLRRHMLTHTKEKPFACHLCGQRFNRNGHLKFHIQRLHSPDGRKSGTPTARAPTQTPTQTIILNSDDETLATLHTALQSSHGVLGPERLQQALSQEHIIVAQEQTVTNQEEAAYIQEITTADGQTVQHLVTSDNQVQYIISQDGVQHLLPQEYVVVPEGHHIQVQEGQITHIQYEQGAPFLQESQIQYVPVSPGQQLVTQAQLEAAAHSAVTAVADAAMAQAQGLFGTDETVPEHIQQLQHQGIEYDVITLADD

SEQ ID NO: 281 - DNA, 3564 bp, Homo sapiens
atggcgacctcgtcgatgccggagtcagagaggaacgtggctacgaaagcctcgggagcccccatgacatcaccaatgtccagttccaccttggcccacagcctagcagccattgaggccctggcagatggccccacatccacatccacatgcctggaggcacagggtgggcccagctccccggtgcagctgcccccagcctccggtgccgaagagccggacctgcagagcctggaggccatgatggaggtggtggtggtgcagcagttcaaatgcaagatgtgccagtaccggagcagcaccaaggccacactgctgcgccacatgcgggaacgccacttccgtccagtagcagcagccgcagcagcagctggtaaaaaaggacgtctacggaagtggagcacctccaccaagagccaagaggaagagggaccagaggaggaggacgatgatgacattgtagacgctggagccattgatgacctggaggaggatagcgactataatccagctgaggatgagccccgaggccggcagcttcggctccagcgccccacccccagtaccccaaggccccgaaggagacctggccggccccggaagctgccccgcctggagatctcagacctcccagatggtgtggaaggagagcctctagtgagttcccagagtggacagagccctccagagccacaggatcccgaggctcccagctcctcaggcccaggacacctggtggccatgggcaaggtgagcaggacccctgtggaagctggtgtgagccagtcagatgcagagaacgcagccccctcctgcccggatgagcatgacactctgccccggcgccgaggtcgaccttccaggcgcttcctaggcaagaaataccgcaagtactattacaagtcgcccaaaccacttttgaggcccttcctgtgccgcatctgtggttctcgctttctgtcccacgaggacctgcgcttccacgtcaactcccatgaggctggcgatccccagctcttcaagtgcctgcagtgcagctatcgttcccgccgctggtcctcgctcaaggagcacatgttcaaccacgtgggcagcaagccctacaagtgtgacgagtgcagctacaccagtgtctaccggaaggacgtcattcggcacgccgctgtgcacagccgggaccggaagaagaggccagatccgactccaaagctgagctctttcccctgccctgtgtgtggccgtgtgtaccccatgcagaaaagactcacgcagcacatgaagacgcacagcactgagaagccccacatgtgtgacaagtgtggaaagtcctttaagaagcgctacaccttcaaaatgcacctgctcacgcacatccaggctgttgccaaccgcaggttcaagtgtgagttctgtgagtttgtttgtgaagacaagaaggcactgctgaaccaccagttgtcccacgtcagtgacaagcccttcaaatgcagcttttgtccctaccgcaccttccgagaggacttcttgctgtcccatgtggctgtcaagcacacaggggccaagcccttcgcctgtgagtactgccacttcagcacacggcacaagaagaacctgcgcctgcacgtacggtgccgacacgcaagcagcttcgaggaatgggggaggcgccaccctgaggagcccccctcccgccgtcgccccttcttctctctgcagcagattgaggagctgaagcagcagcacagtgcggcccctggaccacctcccagttccccaggacctcctgagatacccccagaggcgacaactttccagtcatctgaggctccctcattgctctgttctgacaccctgggcggcgccaccatcatctaccagcaaggagctgaggagtcgacagcgatggccacgcagacagccttggatcttctgctgaacatgagtgctcagcgggaactggggggcacagccctgcaggtggctgtggtgaagtcggaagatgtggaagcagggttagcatcccctggtgggcagccctcccctgaaggtgccactccacaggtggtcaccctccacgtggcagagccagggggcggtgcagcagccgagagccagctaggccctcctgacctaccgcagatcaccctggcacctggtccatttggtgggactggctacagtgtcatcacagcaccccctatggaggagggaacatcagctcctggcacaccttacagcgaggagcccgcaggagaggcagcccaggctgtggttgtgagtgacaccctaaaagaagctggcacccactacatcatggctactgatggtacccagttgcaccacattgagctcaccgcagatggctccatctccttcccaagtccagatgctctggcctctggtgccaaatggcccctgctgcagtgtgggggactgcccagagacggccctgagcccccatctccagccaagacccactgcgtaggggactcccagagctctgcctcctcacctcctgcaaccagcaaagccctgggcctggcagtgcccccgtcaccgccatctgcagccactgctgcatcaaagaagttttcctgcaagatctgtgccgaggccttccctggccgagctgagatggagagtcacaagcgggcccacgctgggcctggtgccttcaagtgccccgactgccccttcagtgcccgccagtggcccgaggtccgggcgcacatggcacagcactcaagcctacggccccaccagtgtagccagtgcagctttgcctccaagaacaagaaggacctgcgtcggcacatgctgactcacacaaaggagaagccttttgcatgccacctctgcgggcagcgtttcaaccgtaacgggcacctcaagttccacatccagcggctgcacagtcctgatgggaggaagtcaggaacccctacagcccgggcccctacccagaccccaacccagaccatcatcctgaacagtgatgacgaaacactggccaccctgcacactgcactccagtccagtcacggggtcctgggcccagagcggctacagcaggcactgagccaggaacacatcatcgttgcccaggaacagacagtgaccaatcaggaggaagccgcctacatccaagagatcaccacggcagatggccagaccgtacagcacctggtgacctccgacaaccaggtgcagtatatcatctcccaggatggtgtccagcacctgctcccccaggaatatgttgtggtccctgaaggccatcacatccaggtacaggagggccagatcacacacatccagtatgaacaaggagccccgttccttcaggagtcccagatccagtatgtgcctgtgtccccaggccagcagcttgtcacacaggctcaacttgaggctgcagcacactcagctgtcacagcagtggctgatgctgccatggcccaagcccagggcctgtttggtacagacgagacagtgcccgaacacattcaacagctgcagcaccagggcatcgagtacgacgtcatcaccctggccgatgactga

SEQ ID NO: 282 - protein, 1187 aa, Homo sapiens
MATSSMPESERNVATKASGAPMTSPMSSSTLAHSLAAIEALADGPTSTSTCLEAQGGPSSPVQLPPASGAEEPDLQSLEAMMEVVVVQQFKCKMCQYRSSTKATLLRHMRERHFRPVAAAAAAAGKKGRLRKWSTSTKSQEEEGPEEEDDDDIVDAGAIDDLEEDSDYNPAEDEPRGRQLRLQRPTPSTPRPRRRPGRPRKLPRLEISDLPDGVEGEPLVSSQSGQSPPEPQDPEAPSSSGPGHLVAMGKVSRTPVEAGVSQSDAENAAPSCPDEHDTLPRRRGRPSRRFLGKKYRKYYYKSPKPLLRPFLCRICGSRFLSHEDLRFHVNSHEAGDPQLFKCLQCSYRSRRWSSLKEHMFNHVGSKPYKCDECSYTSVYRKDVIRHAAVHSRDRKKRPDPTPKLSSFPCPVCGRVYPMQKRLTQHMKTHSTEKPHMCDKCGKSFKKRYTFKMHLLTHIQAVANRRFKCEFCEFVCEDKKALLNHQLSHVSDKPFKCSFCPYRTFREDFLLSHVAVKHTGAKPFACEYCHFSTRHKKNLRLHVRCRHASSFEEWGRRHPEEPPSRRRPFFSLQQIEELKQQHSAAPGPPPSSPGPPEIPPEATTFQSSEAPSLLCSDTLGGATIIYQQGAEESTAMATQTALDLLLNMSAQRELGGTALQVAVVKSEDVEAGLASPGGQPSPEGATPQVVTLHVAEPGGGAAAESQLGPPDLPQITLAPGPFGGTGYSVITAPPMEEGTSAPGTPYSEEPAGEAAQAVVVSDTLKEAGTHYIMATDGTQLHHIELTADGSISFPSPDALASGAKWPLLQCGGLPRDGPEPPSPAKTHCVGDSQSSASSPPATSKALGLAVPPSPPSAATAASKKFSCKICAEAFPGRAEMESHKRAHAGPGAFKCPDCPFSARQWPEVRAHMAQHSSLRPHQCSQCSFASKNKKDLRRHMLTHTKEKPFACHLCGQRFNRNGHLKFHIQRLHSPDGRKSGTPTARAPTQTPTQTIILNSDDETLATLHTALQSSHGVLGPERLQQALSQEHIIVAQEQTVTNQEEAAYIQEITTADGQTVQHLVTSDNQVQYIISQDGVQHLLPQEYVVVPEGHHIQVQEGQITHIQYEQGAPFLQESQIQYVPVSPGQQLVTQAQLEAAAHSAVTAVADAAMAQAQGLFGTDETVPEHIQQLQHQGIEYDVITLADD

SEQ ID NO: 283 - DNA, 591 bp, Homo sapiens
atgtggttcatgtacctgctgagctggctgtcgctcttcatccaggtggccttcatcacgctggctgtcgcggctggactctattacctggcagaactgatagaagaatacacagtggccaccagcaggatcataaaatacatgatctggttctccaccgctgtactgattggcctctacgtctttgagcgcttccccaccagcatgattggagtgggcctattcaccaacctcgtctactttggcctcctccagaccttccccttcatcatgctgacctcgcctaacttcatcctgtcgtgtggactagtggtggtgaatcattacctagcatttcagttttttgcagaagaatattatcccttctcagaggtcctggcctatttcactttctgcctgtggataattccgtttgcgttttttgtgtcactttcggccggggagaacgtcctgccctctaccatgcagccaggagatgatgtcgtctccaattatttcaccaaaggcaagcggggcaaacgcttagggatcctggttgtcttctccttcatcaaagaggccattctacccagtcgtcagaagatatactga

SEQ ID NO: 284 - protein, 196 aa, Homo sapiens
MWFMYLLSWLSLFIQVAFITLAVAAGLYYLAELIEEYTVATSRIIKYMIWFSTAVLIGLYVFERFPTSMIGVGLFTNLVYFGLLQTFPFIMLTSPNFILSCGLVVVNHYLAFQFFAEEYYPFSEVLAYFTFCLWIIPFAFFVSLSAGENVLPSTMQPGDDVVSNYFTKGKRGKRLGILVVFSFIKEAILPSRQKIY

SEQ ID NO: 285 - DNA, 450 bp, Homo sapiens
atgatctggttctccaccgctgtactgattggcctctacgtctttgagcgcttccccaccagcatgattggagtgggcctattcaccaacctcgtctactttggcctcctccagaccttccccttcatcatgctgacctcgcctaacttcatcctgtcgtgtggactagtggtggtgaatcattacctagcatttcagttttttgcagaagaatattatcccttctcagaggtcctggcctatttcactttctgcctgtggataattccgtttgcgttttttgtgtcactttcggccggggagaacgtcctgccctctaccatgcagccaggagatgatgtcgtctccaattatttcaccaaaggcaagcggggcaaacgcttagggatcctggttgtcttctccttcatcaaagaggccattctacccagtcgtcagaagatatactga

SEQ ID NO: 286 - protein, 149 aa, Homo sapiens
MIWFSTAVLIGLYVFERFPTSMIGVGLFTNLVYFGLLQTFPFIMLTSPNFILSCGLVVVNHYLAFQFFAEEYYPFSEVLAYFTFCLWIIPFAFFVSLSAGENVLPSTMQPGDDVVSNYFTKGKRGKRLGILVVFSFIKEAILPSRQKIY

SEQ ID NO: 287 - DNA, 1631 bp, Homo sapiens; identical to SEQ ID NO: 163

SEQ ID NO: 288 - protein, 465 aa, Homo sapiens; identical to SEQ ID NO: 164

SEQ ID NO: 289 - DNA, 1682 bp, Homo sapiens; identical to SEQ ID NO: 165

SEQ ID NO: 290 - protein, 490 aa, Homo sapiens; identical to SEQ ID NO: 166

SEQ ID NO: 291 - DNA, 519 bp, Homo sapiens; identical to SEQ ID NO: 71

SEQ ID NO: 292 - protein, 172 aa, Homo sapiens; identical to SEQ ID NO: 72

SEQ ID NO: 293 - DNA, 256 bp, Homo sapiens; identical to SEQ ID NO: 73

SEQ ID NO: 294 - protein, 85 aa, Homo sapiens; identical to SEQ ID NO: 74

SEQ ID NO: 295 - DNA, 158 bp, Homo sapiens; identical to SEQ ID NO: 75

SEQ ID NO: 296 - protein, 53 aa, Homo sapiens; identical to SEQ ID NO: 76

SEQ ID NO: 297 - DNA, 468 bp, Homo sapiens; identical to SEQ ID NO: 77

SEQ ID NO: 298 - protein, 155 aa, Homo sapiens; identical to SEQ ID NO: 78

SEQ ID NO: 299 - DNA, 513 bp, Homo sapiens; identical to SEQ ID NO: 79

SEQ ID NO: 300 - protein, 170 aa, Homo sapiens; identical to SEQ ID NO: 80

SEQ ID NO: 301 - DNA, 318 bp, Homo sapiens; identical to SEQ ID NO: 81

SEQ ID NO: 302 - protein, 105 aa, Homo sapiens; identical to SEQ ID NO: 82

SEQ ID NO: 303 - DNA, 318 bp, Homo sapiens; identical to SEQ ID NO: 81

SEQ ID NO: 304 - protein, 105 aa, Homo sapiens; identical to SEQ ID NO: 82

SEQ ID NO: 305 - DNA, 492 bp, Homo sapiens; identical to SEQ ID NO: 85

SEQ ID NO: 306 - protein, 163 aa, Homo sapiens; identical to SEQ ID NO: 86

SEQ ID NO: 307 - DNA, 65 bp, Homo sapiens; identical to SEQ ID NO: 87

SEQ ID NO: 308 - protein, 22 aa, Homo sapiens
MMGVLFCCGAGFFIRRRMYPPP

SEQ ID NO: 309 - DNA, 318 bp, Homo sapiens; identical to SEQ ID NO: 81

SEQ ID NO: 310 - protein, 105 aa, Homo sapiens; identical to SEQ ID NO: 82

SEQ ID NO: 311 - DNA, 330 bp, Homo sapiens; identical to SEQ ID NO: 91

SEQ ID NO: 312 - protein, 109 aa, Homo sapiens; identical to SEQ ID NO: 92

SEQ ID NO: 313 - DNA, 288 bp, Homo sapiens; identical to SEQ ID NO: 93

SEQ ID NO: 314 - protein, 96 aa, Homo sapiens; identical to SEQ ID NO: 94

SEQ ID NO: 315 - DNA, 1134 bp, Homo sapiens
atgtacaccttcgtggtacgcgatgagaacagcagcgtctacgccgaggtctcccggctgctcctcgccaccggccactggaagaggctgcggcgagacaaccccagattcaacctgatgctgggagagaggaatcggctgcccttcgggagactgggtcacgagcccgggctggtacagttggtgaattactacaggggtgctgacaaactgtgtcgcaaagcttctttagtgaagctaatcaagacaagccctgaactggctgagtcctgcacatggttccctgaatcttatgtgatttatccaaccaatctcaagactccagttgctccagcacagaatggaattcagccaccaatcagtaactcaaggacagatgaaagagaattctttctcgcctcttataacagaaagaaagaggatggagagggcaacgtttggattgcaaagtcatcagccggtgccaaaggtgaaggcattctcatctcctcagaggcttcagagcttctcgatttcatagacaaccagggccaagtgcacgtgatccagaaatatcttgagcaccctctgctgcttgagccaggtcatcgcaagtttgacatccgaagctgggtcttggtggatcatcagtataatatctacctctatagagagggtgtgcttcggactgcttcagaaccatatcatgttgataatttccaagacaaaacctgccatttgaccaatcactgcattcaaaaagagtattcaaagaactacgggaagtatgaagaaggaaatgaaatgttcttcaaggagttcaatcagtacctaacaagtgctttgaacattaccctagaaagtagtatcttactacaaatcaaacatataataaggaactgcctcctgagcgtggagcctgccattagcaccaagcacctcccttaccagagcttccagctcttcggctttgacttcatggtcgatgaggagctgaaggtgtggctcattgaggtcaacggtgcccctgcatgtgctcagaagctctatgcagaactgtgccaaggcatcgtggacatagccatttccagtgtcttcccacccccagatgtggagcaacctcagacccagccagctgccttcatcaagctgtga

SEQ ID NO: 316 - protein, 377 aa, Homo sapiens
MYTFVVRDENSSVYAEVSRLLLATGHWKRLRRDNPRFNLMLGERNRLPFGRLGHEPGLVQLVNYYRGADKLCRKASLVKLIKTSPELAESCTWFPESYVIYPTNLKTPVAPAQNGIQPPISNSRTDEREFFLASYNRKKEDGEGNVWIAKSSAGAKGEGILISSEASELLDFIDNQGQVHVIQKYLEHPLLLEPGHRKFDIRSWVLVDHQYNIYLYREGVLRTASEPYHVDNFQDKTCHLTNHCIQKEYSKNYGKYEEGNEMFFKEFNQYLTSALNITLESSILLQIKHIIRNCLLSVEPAISTKHLPYQSFQLFGFDFMVDEELKVWLIEVNGAPACAQKLYAELCQGIVDIAISSVFPPPDVEQPQTQPAAFIKL

SEQ ID NO: 317 - DNA, 3927 bp, Homo sapiens
gtcgcgcgagggacacgccgcgttgtgggttctcggcctgaggtgcgagagaagcggtgaccgcggccctggctgctcggacccgggaacatgatggtcgctggagcagaaggcgctgagaagggaccacggcggcgctgggtcgtgcgagccagtagcgggctgaaacgtagaggccagaaccaggtctcagggggcactaaaggcggtcggaggtaatccccacaccgcttcctcctggaagtcaggctggccgggagctcccgtatccaggacggttggtcgcctctggcctggcagggatcctagtgtctcgggacctcccggtgacgcgcctgcctcccctgctgcaccataggcccgggagtacggcgtccccacagcttggaccggcaggggctcgtgaaatgtttgtcaagtggataaatgaccatggccgtggtctccgcgggaggtgaggaaactgaaagccaccgaggaaaaggggggcgctccttaagaagtgccgcggtcacgtgtacgtttcaaaagaatggcgtgactgagtagggaggggaccgcggagaccctcagaccctggactgtaaggagatgaggggccgtgaaggggaacccaggaaactgagtcctgaaagcaaggaggaacttccagaatgaagggcgccgacactccttcctgcctttgctcaagcggttccttcaccccgatcaagttccttcccatttctccatctgggggatcctgaacgtgcacatcctcagagaagccctcctggggtctccaattctagtttattgccccctcctatcgatcccccagcgcgctcatcgggcctgtggacaaggacaggtttgaagagaggattccctggatcgcggaagggctgcaggaatggcacagccccttccgaggatgccaaaggagcccgggcaaaggaaagtggccgtgcccgggcctgcctaccactagatccccacccacctatgactgctcagtcccgctctcctaccacacccacctttcccggcccaagccagcgcaccccgctgactccctgcccagtccaaactccaaggctgggcaaggcactgatccactgctggacagacccggggcagcctctgggtgaacagcagcgtgtccgccggcagcgaaccgagaccagcgagccgaccatgcggctgcacagacttcgtgcgcggctgagcgcggtggcctgtgggcttctgctgcttcttgtccggggccagggccaggactcagccagtcccatccggaccacacacacggggcaggtgctggggagtcttgtccatgtgaagggcgccaatgccggggtccaaaccttcctgggaattccatttgccaagccacctctaggtccgctgcgatttgcaccccctgagccccctgaatcttggagtggtgtgagggatggaaccacccatccggccatgtgtctacaggacctcaccgcagtggagtcagagtttcttagccagttcaacatgaccttcccttccgactccatgtctgaggactgcctgtacctcagcatctacacgccggcccatagccatgaaggctctaacctgccggtgatggtgtggatccacggtggtgcgcttgtttttggcatggcttccttgtatgatggttccatgctggctgccttggagaacgtggtggtggtcatcatccagtaccgcctgggtgtcctgggcttcttcagcactggagacaagcacgcaaccggcaactggggctacctggaccaagtggctgcactacgctgggtccagcagaatatcgcccactttggaggcaaccctgaccgtgtcaccatttttggcgagtctgcgggtggcacgagtgtgtcttcgcttgttgtgtcccccatatcccaaggactcttccacggagccatcatggagagtggcgtggccctcctgcccggcctcattgccagctcagctgatgtcatctccacggtggtggccaacctgtctgcctgtgaccaagttgactctgaggccctggtgggctgcctgcggggcaagagtaaagaggagattcttgcaattaacaagcctttcaagatgatccccggagtggtggatggggtcttcctgcccaggcacccccaggagctgctggcctctgccgactttcagcctgtccctagcattgttggtgtcaacaacaatgaattcggctggctcatccccaaggtcatgaggatctatgatacccagaaggaaatggacagagaggcctcccaggctgctctgcagaaaatgttaacgctgctgatgttgcctcctacatttggtgacctgctgagggaggagtacattggggacaatggggatccccagaccctccaagcgcagttccaggagatgatggcggactccatgtttgtgatccctgcactccaagtagcacattttcagtgttcccgggcccctgtgtacttctacgagttccagcatcagcccagctggctcaagaacatcaggccaccgcacatgaaggcagaccatggtgatgagcttccttttgttttcagaagtttctttgggggcaactacattaaattcactgaggaagaggagcagctaagcaggaagatgatgaagtactgggccaactttgcgagaaatgggaaccccaatggcgagggtctgccacactggccgctgttcgaccaggaggagcaatacctgcagctgaacctacagcctgcggtgggccgggctctgaaggcccacaggctccagttctggaagaaggcgctgccccaaaagatccaggagctcgaggagcctgaagagagacacacagagctgtagctccctgtgccggggaggagggggtgggttcgctgacaggcgagggtcagcctgctgtgcccacacacacccactaaggagaaagaagttgattccttcattcacttcgccattcattcatacttccgtccatccattcagaaagcatttattaagaatttactcaggcatgatggcccatacttgtaatcccagctattgggaaggatgagatgggaggatggcttgaggccagaggtttgagaccgaccagccagggcaacacagtgagaccccttctcaaaaaaaaaaaaaaaaaagagagagtgtgtgattagaagctaaataggaaagttttgagcttcaagtcagtgaggagtaaaaaagatttttaaaaagcaaagaaaacaaaatataagggaaaaatatgagaaaaataaaaataaaaagagaataataggccaggcactgtggctcatgcccctaatcccagcacttttgggaggtcaaggtgagcagaacacctgaggacaggagtttgagaccagcctgcccaacgtggtgaaaccccatctctatgaaaaatacaaaaatcagacgggcacagtggtggtgcccacctgtgatcccagctactcaggaggctgaggcaggagaattacttgaacctgggaggcagaggttgcagtgagctgagattgtgccactgtactccagcctgggcaacaagagcgagactccgtttccaaaaaaataagagagaatagaagaagctactgcatgatgttagttaccaagcctgccatgggtcctctcttgctagacacactccatagatccccccactgagctgtggatgggcaaaccccggtggaatcccaccctccccaacaccccactgagccctgggccccctcctcccttcctcacctccaccttctccctgccttctctcttctctcgtctgagcccccaggccttttccactttgagggaggtgcttcgaagaatgttgcccacacctaagtgttagaagcctatgtccgttcatccctgagaggtctgaaagaataaaaataaattctaaaaaaa

SEQ ID NO: 318 - protein, 623 aa, Homo sapiens
MTAQSRSPTTPTFPGPSQRTPLTPCPVQTPRLGKALIHCWTDPGQPLGEQQRVRRQRTETSEPTMRLHRLRARLSAVACGLLLLLVRGQGQDSASPIRTTHTGQVLGSLVHVKGANAGVQTFLGIPFAKPPLGPLRFAPPEPPESWSGVRDGTTHPAMCLQDLTAVESEFLSQFNMTFPSDSMSEDCLYLSIYTPAHSHEGSNLPVMVWIHGGALVFGMASLYDGSMLAALENVVVVIIQYRLGVLGFFSTGDKHATGNWGYLDQVAALRWVQQNIAHFGGNPDRVTIFGESAGGTSVSSLVVSPISQGLFHGAIMESGVALLPGLIASSADVISTVVANLSACDQVDSEALVGCLRGKSKEEILAINKPFKMIPGVVDGVFLPRHPQELLASADFQPVPSIVGVNNNEFGWLIPKVMRIYDTQKEMDREASQAALQKMLTLLMLPPTFGDLLREEYIGDNGDPQTLQAQFQEMMADSMFVIPALQVAHFQCSRAPVYFYEFQHQPSWLKNIRPPHMKADHGDELPFVFRSFFGGNYIKFTEEEEQLSRKMMKYWANFARNGNPNGEGLPHWPLFDQEEQYLQLNLQPAVGRALKAHRLQFWKKALPQKIQELEEPEERHTEL

SEQ ID NO: 319 - DNA, 3868 bp, Homo sapiens
gtggcgtggcgacggagtcgcgcgagggacacgccgcgttgtgggttctcggcctgaggtgcgagagaagcggtgaccgcggccctggctgctcggacccgggaacatgatggtcgctggagcagaaggcgctgagaagggaccacggcggcgctgggtcgtgcgagccagtagcgggctgaaacgtagaggccagaaccaggtctcagggggcactaaaggcggtcggaggtaatccccacaccgcttcctcctggaagtcaggctggccgggagctcccgtatccaggacggttggtcgcctctggcctggcagggatcctagtgtctcgggacctcccggtgacgcgcctgcctcccctgctgcaccataggcccgggagtacggcgtccccacagcttggaccggcaggggctcgtgaaatgtttgtcaagtggataaatgaccatggccgtggtctccgcgggaggtgaggaaactgaaagccaccgaggaaaaggggggcgctccttaagaagtgccgcggtcacgtgtacgtttcaaaagaatggcgtgactgagtagggaggggaccgcggagaccctcagaccctggactgtaaggagatgaggggccgtgaaggggaacccaggaaactgagtcctgaaagcaaggaggaacttccagaatgaagggcgccgacactccttcctgcctttgctcaagcggttccttcaccccgatcaagttccttcccatttctccatctgggggatcctgaacgtgcacatcctcagagaagccctcctggggtctccaattctagtttattgccccctcctatcgatcccccagcgcgctcatcgggcctgtggacaaggacaggtttgaagagaggattccctggatcgcggaagggctgcaggaatggcacagccccttccgaggatgccaaaggagcccgggcaaaggaaagtggccgtgcccgggcctgcctaccactagatccccacccacctatgactgctcagtcccgctctcctaccacacccacctttcccggcccaagccagcgcaccccgctgactccctgcccagtccaaactccaaggctgggcaaggcactgatccactgctggacagacccggggcagcctctgggtgaacagcagcgtgtccgccggcagcgaaccgagaccagcgagccgaccatgcggctgcacagacttcgtgcgcggctgagcgcggtggcctgtgggcttctgctgcttcttgtccggggccagggccaggactcagccagtcccatccggaccacacacacggggcaggtgctggggagtcttgtccatgtgaagggcgccaatgccggggtccaaaccttcctgggaattccatttgccaagccacctctaggtccgctgcgatttgcaccccctgagccccctgaatcttggagtggtgtgagggatggaaccacccatccggccatgtgtctacaggacctcaccgcagtggagtcagagtttcttagccagttcaacatgaccttcccttccgactccatgtctgaggactgcctgtacctcagcatctacacgccggcccatagccatgaaggctctaacctgccggtgatggtgtggatccacggtggtgcgcttgtttttggcatggcttccttgtatgatggttccatgctggctgccttggagaacgtggtggtggtcatcatccagtaccgcctgggtgtcctgggcttcttcagcactggagacaagcacgcaaccggcaactggggctacctggaccaagtggctgcactacgctgggtccagcagaatatcgcccactttggaggcaaccctgaccgtgtcaccatttttggcgagtctgcgggtggcacgagtgtgtcttcgcttgttgtgtcccccatatcccaaggactcttccacggagccatcatggagagtggcgtggccctcctgcccggcctcattgccagctcagctgatgtcatctccacggtggtggccaacctgtctgcctgtgaccaagttgactctgaggccctggtgggctgcctgcggggcaagagtaaagaggagattcttgcaattaacaagcctttcaagatgatccccggagtggtggatggggtcttcctgcccaggcacccccaggagctgctggcctctgccgactttcagcctgtccctagcattgttggtgtcaacaacaatgaattcggctggctcatccccaaggtcatgaggatctatgatacccagaaggaaatggacagagaggcctcccaggctgctctgcagaaaatgttaacgctgctgatgttgcctcctacatttggtgacctgctgagggaggagtacattggggacaatggggatccccagaccctccaagcgcagttccaggagatgatggcggactccatgtttgtgatccctgcactccaagtagcacattttcagtgttcccgggcccctgtgtacttctacgagttccagcatcagcccagctggctcaagaacatcaggccaccgcacatgaaggcagaccatgttaaattcactgaggaagaggagcagctaagcaggaagatgatgaagtactgggccaactttgcgagaaatgggaaccccaatggcgagggtctgccacactggccgctgttcgaccaggaggagcaatacctgcagctgaacctacagcctgcggtgggccgggctctgaaggcccacaggctccagttctggaagaaggcgctgccccaaaagatccaggagctcgaggagcctgaagagagacacacagagctgtagctccctgtgccggggaggagggggtgggttcgctgacaggcgagggtcagcctgctgtgcccacacacacccactaaggagaaagaagttgattccttcattcacttcgccattcattcatacttccgtccatccattcagaaagcatttattaagaatttactcaggcatgatggcccatacttgtaatcccagctattgggaaggatgagatgggaggatggcttgaggccagaggtttgagaccgaccagccagggcaacacagtgagaccccttctcaaaaaaaaaaaaaaaaaagagagagtgtgtgattagaagctaaataggaaagttttgagcttcaagtcagtgaggagtaaaaaagatttttaaaaagcaaagaaaacaaaatataagggaaaaatatgagaaaaataaaaataaaaagagaataataggccaggcactgtggctcatgcccctaatcccagcacttttgggaggtcaaggtgagcagaacacctgaggacaggagtttgagaccagcctgcccaacgtggtgaaaccccatctctatgaaaaatacaaaaatcagacgggcacagtggtggtgcccacctgtgatcccagctactcaggaggctgaggcaggagaattacttgaacctgggaggcagaggttgcagtgagctgagattgtgccactgtactccagcctgggcaacaagagcgagactccgtttccaaaaaaataagagagaatagaagaagctactgcatgatgttagttaccaagcctgccatgggtcctctcttgctagacacactccatagatccccccactgagctgtggatgggcaaaccccggtggaatcccaccctccccaacaccccactgagccctgggccccctcctcccttcctcacctccaccttctccctgccttctctcttctctcgtctgagcccccaggccttttccactttgagggaggtgcttcgaagaatgttgcccacacctaagtgttagaagcctatgtccgttcatccctgagaggtctg

SEQ ID NO: 320 - protein, 607 aa, Homo sapiens
MTAQSRSPTTPTFPGPSQRTPLTPCPVQTPRLGKALIHCWTDPGQPLGEQQRVRRQRTETSEPTMRLHRLRARLSAVACGLLLLLVRGQGQDSASPIRTTHTGQVLGSLVHVKGANAGVQTFLGIPFAKPPLGPLRFAPPEPPESWSGVRDGTTHPAMCLQDLTAVESEFLSQFNMTFPSDSMSEDCLYLSIYTPAHSHEGSNLPVMVWIHGGALVFGMASLYDGSMLAALENVVVVIIQYRLGVLGFFSTGDKHATGNWGYLDQVAALRWVQQNIAHFGGNPDRVTIFGESAGGTSVSSLVVSPISQGLFHGAIMESGVALLPGLIASSADVISTVVANLSACDQVDSEALVGCLRGKSKEEILAINKPFKMIPGVVDGVFLPRHPQELLASADFQPVPSIVGVNNNEFGWLIPKVMRIYDTQKEMDREASQAALQKMLTLLMLPPTFGDLLREEYIGDNGDPQTLQAQFQEMMADSMFVIPALQVAHFQCSRAPVYFYEFQHQPSWLKNIRPPHMKADHVKFTEEEEQLSRKMMKYWANFARNGNPNGEGLPHWPLFDQEEQYLQLNLQPAVGRALKAHRLQFWKKALPQKIQELEEPEERHTEL

SEQ ID NO: 321 - DNA, 1812 bp, Homo sapiens; identical to SEQ ID NO: 99

SEQ ID NO: 322 - protein, 603 aa, Homo sapiens; identical to SEQ ID NO: 100

SEQ ID NO: 323 - DNA, 1626 bp, Homo sapiens; identical to SEQ ID NO: 101

SEQ ID NO: 324 - protein, 541 aa, Homo sapiens; identical to SEQ ID NO: 102

SEQ ID NO: 325 - DNA, 1082 bp, Homo sapiens
gccatggcggcgtctctggggcaggtgttggctctggtgctggtggccgctctgtggggtggcacgcagccgctgctgaagcgggcctccgccggcctgcagcgggttcatgagccgacctgggcccagcagttgctacaggagatgaagaccctcttcttgaatactgagtacctgatgccctttctcctcaaccagtgtggatcccttctctattacctcaccttggcatcgacagatctgaccctggctgtgcccatctgtaactctctggctatcatcttcacactgattgttgggaaggcccttggagaagatattggtggaaaacgagcagttgctggcatggtgctcaccgtgataggaatttcactctgcatcacaagctcagtgagtaagacccaggggcaacagtctaccctttgagtgggccgaacccacttccagctctgctgcctccaggaagcccctgggccatgaagtgctggcagtgagcggatggacctagcacttcccctctctggccttagcttcctcctctcttatggggataacagctacctcatggatcacaataagagaacaagagtgaaagagttttgtaaccttcaagtgctgttcagctgcggggatttagcacaggagactctacgctcaccctcagcaacctttctgccccagcagctctcttcctgctaacatctcaggctcccagcccagccaccattactgtggcctgatctggactatcatggtggcaggttccatggactgcagaactccagctgcatggaaagggccagctgcagactttgagccagaaatgcaaacgggaggcctctgggactcagtcagagcgctttggctgaatgaggggtggaaccgagggaagaaggtgcgtcggagtggcagatgcaggaaatgagctgtctattagccttgcctgccccacccatgaggtaggcagaaatcctcactgccagcccctcttaaacaggtagagagctgtgagccccagccccacctgactccagcacacctggcgagtagtagctgtcaataaatctatggtaaacagacaa

SEQ ID NO: 326 - protein, 140 aa, Homo sapiens
MAASLGQVLALVLVAALWGGTQPLLKRASAGLQRVHEPTWAQQLLQEMKTLFLNTEYLMPFLLNQCGSLLYYLTLASTDLTLAVPICNSLAIIFTLIVGKALGEDIGGKRAVAGMVLTVIGISLCITSSVSKTQGQQSTL

SEQ ID NO: 327 - DNA, 721 bp, Homo sapiens
agacagcggcgttgccatggcggcgtctctggggcaggtgttggctctggtgctggtggccgctctgtggggtggcacgcagccgctgctgaagcgggcctccgccggcctgcagcgggttcatgagccgacctgggcccagcagttgctacaggagatgaagaccctcttcttgaatactgagtacctgatgccctttctcctcaaccagtgtggatcccttctctattacctcaccttggcatcgacagatctgaccctggctgtgcccatctgtaactctctggctatcatcttcacactgattgttgggaaggcccttggagaagatattggtggaaaacgagcagttgctggcatggtgctcaccgtgataggaatttcactctgcatcacaagctcagttccatggactgcagaactccagctgcatggaaagggccagctgcagactttgagccagaaatgcaaacgggaggcctctgggactcagtcagagcgctttggctgaatgaggggtggaaccgagggaagaaggtgcgtcggagtggcagatgcaggaaatgagctgtctattagccttgcctgccccacccatgaggtaggcagaaatcctcactgccagcccctcttaaacaggtagagagctgtgagccccagccccacctgactccagcacacctggcgagtagtagctgtcaataaatctatggtaaacaga

SEQ ID NO: 328 - protein, 164 aa, Homo sapiens
MAASLGQVLALVLVAALWGGTQPLLKRASAGLQRVHEPTWAQQLLQEMKTLFLNTEYLMPFLLNQCGSLLYYLTLASTDLTLAVPICNSLAIIFTLIVGKALGEDIGGKRAVAGMVLTVIGISLCITSSVPWTAELQLHGKGQLQTLSQKCKREASGTQSERFG

SEQ ID NO: 329 - DNA, 492 bp, Homo sapiens
gcggctagctgggggcaggtgttggctctggtgctggtggccgctctgtggggtggcacgcagccgctgctgaagcgggcctccgccggcctgcagcgggttcatgagccgacctgggcccagcagttgctacaggagatgaagaccctcttcttgaatactgagtacctgatgccctttctcctcaaccagtgtggatcccttctctattacctcaccttggcatcgacagatctgaccctggctgtgcccatctgtaactctctggctatcatcttcacactgattgttgggaaggcccttggagaagatattggtggaaaacgagcagttgctggcatggtgctcaccgtgataggaatttcactctgcatcacaagctcagttccatggactgcagaactccagctgcatggaaagggccagctgcagactttgagccagaaatgcaaacgggaggcctctgggactcagtcagagcgctttggctga

SEQ ID NO: 330 - protein, 163 aa, Homo sapiens
AASWGQVLALVLVAALWGGTQPLLKRASAGLQRVHEPTWAQQLLQEMKTLFLNTEYLMPFLLNQCGSLLYYLTLASTDLTLAVPICNSLAIIFTLIVGKALGEDIGGKRAVAGMVLTVIGISLCITSSVPWTAELQLHGKGQLQTLSQKCKREASGTQSERFG

SEQ ID NO: 331 - DNA, 1411 bp, Homo sapiens
gtagaagacagcggcgttgccatggcggcgtctctggggcaggtgttggctctggtgctggtggccgctctgtggggtggcacgcagccgctgctgaagcgggcctccgccggcctgcagcgggttcatgagccgacctgggcccagcagttgctacaggagatgaagaccctcttcttgaatactgagtacctgatgccctttctcctcaaccagtgtggatcccttctctattacctcaccttggcatcgacagatctgaccctggctgtgcccatctgtaactctctggctatcatcttcacactgattgttgggaaggcccttggagaagatattggtggaaaacgtaagttagactactgcgagtgcgggacgcagctctgtggatctcgacatacctgtgttagttccttcccagaacccatctccccagagtgggtgaggacacggccttttcccatcctgccctttcctctgcagctgttttgcttccttgtggccatcagagttcccttcccctggacagtctggagaaagacagaggctggggtttgggattgaagaccagaccccatctgagcccttcctccagccctgtaccagctcctactggcatggctgagctcagaccctcctgatttctgcctattatcccaggagcagttgctggcatggtgctcaccgtgataggaatttcactctgcatcacaagctcagtgagtaagacccaggggcaacagtctaccctttgagtgggccgaacccacttccagctctgctgcctccaggaagcccctgggccatgaagtgctggcagtgagcggatggacctagcacttcccctctctggccttagcttcctcctctcttatggggataacagctacctcatggatcacaataagagaacaagagtgaaagagttttgtaaccttcaagtgctgttcagctgcggggatttagcacaggagactctacgctcaccctcagcaacctttctgccccagcagctctcttcctgctaacatctcaggctcccagcccagccaccattactgtggcctgatctggactatcatggtggcaggttccatggactgcagaactccagctgcatggaaagggccagctgcagactttgagccagaaatgcaaacgggaggcctctgggactcagtcagagcgctttggctgaatgaggggtggaaccgagggaagaaggtgcgtcggagtggcagatgcaggaaatgagctgtctattagccttgcctgccccacccatgaggtaggcagaaatcctcactgccagcccctcttaaacaggtagagagctgtgagccccagccccacctgactccagcacacctggcgagtagtagctgtcaataaatctatggtaaacagacaa

SEQ ID NO: 332 - protein, 180 aa, Homo sapiens
MAASLGQVLALVLVAALWGGTQPLLKRASAGLQRVHEPTWAQQLLQEMKTLFLNTEYLMPFLLNQCGSLLYYLTLASTDLTLAVPICNSLAIIFTLIVGKALGEDIGGKRKLDYCECGTQLCGSRHTCVSSFPEPISPEWVRTRPFPILPFPLQLFCFLVAIRVPFPWTVWRKTEAGVWD

SEQ ID NO: 333 - DNA, 288 bp, Homo sapiens
gcggctagctgggggcaggtgttggctctggtgctggtggccgctctgtggggtggcacgcagccgctgctgaagcgggcctccgccggcctgcagcgggttcatgagccgacctgggcccagcagttgctacaggagatgaagaccctcttcttgaatactgagtacctgatgccctttctcctcaaccagtgtggatcccttctctattacctcaccttggcatcgacaggctggtcccagacctcagagttcaggtcttcatgctggaatcctgggaagcactga

SEQ ID NO: 334 - protein, 95 aa, Homo sapiens
AASWGQVLALVLVAALWGGTQPLLKRASAGLQRVHEPTWAQQLLQEMKTLFLNTEYLMPFLLNQCGSLLYYLTLASTGWSQTSEFRSSCWNPGKH

SEQ ID NO: 335 - DNA, 540 bp, Homo sapiens
gcggctagctgggggcaggtgttggctctggtgctggtggccgctctgtggggtggcacgcagccgctgctgaagcgggcctccgccggcctgcagcgggttcatgagccgacctgggcccagcagttgctacaggagatgaagaccctcttcttgaatactgagtacctgatgccctttctcctcaaccagtgtggatcccttctctattacctcaccttggcatcgacagatctgaccctggctgtgcccatctgtaactctctggctatcatcttcacactgattgttgggaaggcccttggagaagatattggtggaaaacgtaagttagactactgcgagtgcgggacgcagctctgtggatctcgacatacctgtgttagttccttcccagaacccatctccccagagtgggtgaggacacggccttttcccatcctgccctttcctctgcagctgttttgcttccttgtggccatcagagttcccttcccctggacagtctggagaaagacagaggctggggtttgggattga

SEQ ID NO: 336 - protein, 179 aa, Homo sapiens
AASWGQVLALVLVAALWGGTQPLLKRASAGLQRVHEPTWAQQLLQEMKTLFLNTEYLMPFLLNQCGSLLYYLTLASTDLTLAVPICNSLAIIFTLIVGKALGEDIGGKRKLDYCECGTQLCGSRHTCVSSFPEPISPEWVRTRPFPILPFPLQLFCFLVAIRVPFPWTVWRKTEAGVWD

SEQ ID NO: 337 - DNA, 5113 bp, Homo sapiens
aggggattaatgaagagccaccagactatctttatggagaatctagattgggaagttaagctaagaatgtgcatttttgaaaaagtttttatggtagaagagaatgtatatcagaggaaagaatgtagagaagaaagcaacattgtccactgggaattgataagttctgcgtagaatttagagttataaggactatctcattggctcctaatgaatgctaaataacaaatggaaattgctatttccatgaggacaacttacaaggacctgtatggcctcattttagctgcttcagtgtgttggagctgttacttgctccttcatttcctgggcctggtgtgacagtggctactgagcgccatgaaggttgtcccagaaaagaatgctgtccggatactctgggggcgagaacggggtgctcgggccatgggagctcagcggcttctgcaggagctggtagaagataaaacccggtggatgaaatgggagggcaagagagtagaactgccggatagtccacgctctaccttcttattggccttcagcccagacaggactctcttagcctccacccatgtgaaccataatatctatattacggaggtgaagactggcaagtgtgttcattccctgattggacaccgccgtactccatggtgtgtcacttttcatcccaccatctcaggccttattgcttctggctgcctagatggggaggttaggatttgggatttacacggtggcagtgaaagctggttcacagatagcaacaatgccattgcctccctggctttccaccctacggctcagctcctgctgattgccactgccaatgagatccacttctgggactggagtcgacgggaaccctttgctgtggtgaagacagctagtgagatggaacgggtccgtctggtgagatttgatccacttggacactacttactcacagcaattgttaacccctctaatcaacagggtgatgacgaaccagagatccccatagatggaacagaattatcccactaccgtcagcgtgccctcctgcaatcacagccagttcgccggacgcctctcctccacaatttcctgcacatgctgtcctcccgctcttctggcatccaggtgggagagcaaagcacagtgcaagattctgctaccccctcacccccaccgcctccccctcagccctccacggagcgccccaggacttccgcttacatcaggctccgacagcgggtcagttaccccacagctgagtgctgccagcaccttgggatcctgtgcctttgcagccgctgctctggcactcgagttccttccctcttgccacaccaggacagtgtcccccctgcttctgccagagctactaccccttccttttcttttgtacagaccgagcccttccatcccccggagcaggcctcgtcaacgcagcaggaccagggcctcctgaaccggccgtctgccttcagtacagtccagagcagcactgccggcaacacgctccgcaacctcagtctgggtcctacccgccgctctttgggagggcctctgtctagccacccttctaggtatcaccgagaaatagctcctgggttgacaggatctgagtggacccggacagtactcagtctgaactcccgctctgaggcggaatccatgcccccgcccagaaccagtgcctcttcggtgagtttgctgtctgtgctgagacagcaggaaggtggctctcaggcatctgtgtacacttcagccacagaagggaggggttttccggcatcagggttggcaactgagtcagatggagggaatggctccagccaaaacaactcgggcagcattcgccatgagcttcagtgtgacctgagacgcttctttctggagtatgaccggcttcaggagctggatcagagcctgagtggggaagctccccagacccaacaggcccaggaaatgctcaacaataacattgaatctgagaggccaggcccttcccaccagcccaccccacacagcagtgagaacaactccaacctgtcccgtggccacctgaatcgctgtcgtgcttgccacaatctcctgaccttcaacaacgataccctgcgctgggaaagaaccacacctaactactcctctggcgaggctagttcctcttggcaggtccccagctcctttgagagtgtgccatcaagtggcagccagttgccacctctcgagcggactgagggccaaacgcccagctccagcaggctggagttgagcagctctgctagtccgcaggaggagaggactgtgggggtggcctttaaccaggagacaggccactgggaaagaatttacacccagtccagcagatctggaactgtgtcacaggaggccttacatcaggatatgcctgaggagagctctgaggaggattcactcaggaggaggctgctggaatcttccctcatttcattatcccgttatgatggagcaggatccagagagcacccaatttacccagacccagcgagggacaatggtgacagatccaggcaccgagctccacgcaatgcccggatgtctgcaccttcgcttggacgctttgtcccaaggcgtttcttgctgcctgagtacttgccttatgctgggatttttcatgaacgtggacagcctggcttggctactcactcttctgttaacagggtcctggcaggggcagtgatcggtgatggacagtctgctgtggccagtaacattgccaatactacctaccggctccagtggtgggacttcactaagtttgacctccctgaaatcagtaatgcttccgtgaatgtgctggtgcagaactgcaagatctacaatgatgccagctgtgacatttctgcagatggccagctcctggcagctttcatccccagcagccagaggggctttcctgatgaaggcatcctggcagtgtactccctggccccccataacctgggcgaaatgctctacaccaagcgatttggtcccaatgccatttcggtgagcctgtccccaatgggcagatatgtaatggtgggcttggcctcacgaaggatcctgctgcacccctccacagagcacatggtggcccaggtcttcaggctgcaacaggcccatggtggagagacctccatgaggagagttttcaacgtcctttatcccatgcctgccgaccagcggagacatgtcagtatcaactctgcccgttggctgcctgagccagggcttggcttggcctatggtactaacaaaggagacctggtgatctgccgaccagaggccttaaactctggtgttgagtactactgggaccagctgaacgagacggtcttcactgtccattccaacagcaggagcagcgagcggcctggaaccagcagagccacatggaggacagacagagacatggggctgatgaatgccattgggcttcagccccggaaccctgccacctcagtgacatctcagggcacccagactctggcccttcagctgcagaatgccgaaacacagactgagagggaggtgccggagccagggacagccgcctcaggtcctggtgaaggtgagggttcagagtatggtgccagtggagaagatgcgctcagcaggatccagaggctgatggcggagggcggcatgacagccgtggtgcagcgggagcagagcaccaccatggcctccatgggcggcttcggcaacaacatcatcgtcagccaccgcattcaccgcagctctcagacgggcactgaacctggtgccgcccacacctcctcaccccagccctccacctctcggggactgctcccagaggccgggcaactggcagagcgaggcctaagcccccggacagcttcctgggaccagcctggtacccctgggcgggagccaacccagccaaccctgccctcttcctcccctgtccccattcctgtttcccttcccagcgctgagggaccaaccctccactgcgagttgaccaataacaaccaccttctggatggtggcagcagcaggggggacgctgcaggccctaggggagaaccacggaacaggtagagacaaacgttgcactggtgcctcccctcgaaccgccaagcagaaaccggacctcacagctgactgggaactggacatgtggaagagctgctggctgcatcagggaacaggaggaggaagagggtcagggtggagaggaagatcagtcagtgggcacaagacagtcaaatgggcaaggcctgcctcggggaactagaaccttccaggatctggagcccgggagagccacactgtgggcttaatgtgaatagaggaacaagtgggtatctctgccaggcaccccactttctcctagtaacatgggctcaggggactcagccctggacagagagcctccagagagtgaacagtcttccagatctgggccaatcatcctggacagaggcccgcgaggcagctttgccctgtccacctgttgggtgggcagagccaccaggaacccagacaccacctccaactctgagccttccagagcttcagcctctcttcgtcgtcttaccccactgaaaccaacagggatcgggccaggctcccagattcttgaggacagggacttcggcatttactaatgggggactactgtggggtaagggggcgcctgcttgcctgatacaggatggggtcaagggacagtgggcaggtcctcactcaggagtggggggtgtaggctggccagcccccagggcttgtccaccagtcttctccccgcaaggccctcagagcagcgcctgtgggtgtcagtattacctgagcctaggccaaagctagcccaaggctggggaaggggaggagactccaggtcagaatgtgaggtctcagtctgtgatttaaggtgttgcatgtggactcttaactgtacgtgtagtttctagtggagaaatcaaggctctgatcattttgtttttagtatgaaaatgtgatttcctttctgtttgtaactcatcatagaaacattgtggtgggaggagaggggatagtctacagctaatgagggaaacaccaaagatcacatcattaaaatgatgacatgcccctc

SEQ ID NO: 338 - protein, 1238 aa, Homo sapiens
MKVVPEKNAVRILWGRERGARAMGAQRLLQELVEDKTRWMKWEGKRVELPDSPRSTFLLAFSPDRTLLASTHVNHNIYITEVKTGKCVHSLIGHRRTPWCVTFHPTISGLIASGCLDGEVRIWDLHGGSESWFTDSNNAIASLAFHPTAQLLLIATANEIHFWDWSRREPFAVVKTASEMERVRLVRFDPLGHYLLTAIVNPSNQQGDDEPEIPIDGTELSHYRQRALLQSQPVRRTPLLHNFLHMLSSRSSGIQVGEQSTVQDSATPSPPPPPPQPSTERPRTSAYIRLRQRVSYPTAECCQHLGILCLCSRCSGTRVPSLLPHQDSVPPASARATTPSFSFVQTEPFHPPEQASSTQQDQGLLNRPSAFSTVQSSTAGNTLRNLSLGPTRRSLGGPLSSHPSRYHREIAPGLTGSEWTRTVLSLNSRSEAESMPPPRTSASSVSLLSVLRQQEGGSQASVYTSATEGRGFPASGLATESDGGNGSSQNNSGSIRHELQCDLRRFFLEYDRLQELDQSLSGEAPQTQQAQEMLNNNIESERPGPSHQPTPHSSENNSNLSRGHLNRCRACHNLLTFNNDTLRWERTTPNYSSGEASSSWQVPSSFESVPSSGSQLPPLERTEGQTPSSSRLELSSSASPQEERTVGVAFNQETGHWERIYTQSSRSGTVSQEALHQDMPEESSEEDSLRRRLLESSLISLSRYDGAGSREHPIYPDPARDNGDRSRHRAPRNARMSAPSLGRFVPRRFLLPEYLPYAGIFHERGQPGLATHSSVNRVLAGAVIGDGQSAVASNIANTTYRLQWWDFTKFDLPEISNASVNVLVQNCKIYNDASCDISADGQLLAAFIPSSQRGFPDEGILAVYSLAPHNLGEMLYTKRFGPNAISVSLSPMGRYVMVGLASRRILLHPSTEHMVAQVFRLQQAHGGETSMRRVFNVLYPMPADQRRHVSINSARWLPEPGLGLAYGTNKGDLVICRPEALNSGVEYYWDQLNETVFTVHSNSRSSERPGTSRATWRTDRDMGLMNAIGLQPRNPATSVTSQGTQTLALQLQNAETQTEREVPEPGTAASGPGEGEGSEYGASGEDALSRIQRLMAEGGMTAVVQREQSTTMASMGGFGNNIIVSHRIHRSSQTGTEPGAAHTSSPQPSTSRGLLPEAGQLAERGLSPRTASWDQPGTPGREPTQPTLPSSSPVPIPVSLPSAEGPTLHCELTNNNHLLDGGSSRGDAAGPRGEPRNR

SEQ ID NO: 339 - DNA, 5302 bp, Homo sapiens
aggggattaatgaagagccaccagactatctttatggagaatctagattgggaagttaagctaagaatgtgcatttttgaaaaagtttttatggtagaagagaatgtatatcagaggaaagaatgtagagaagaaagcaacattgtccactgggaattgataagttctgcgtagaatttagagttataaggactatctcattggctcctaatgaatgctaaataacaaatggaaattgctatttccatgaggacaacttacaaggacctgtatggcctcattttagctgcttcagtgtgttggagctgttacttgctccttcatttcctgggcctggtgtgacagtggctactgagcgccatgaaggttgtcccagaaaagaatgctgtccggatactctgggggcgagaacggggtgctcgggccatgggagctcagcggcttctgcaggagctggtagaagataaaacccggtggatgaaatgggagggcaagagagtagaactgccggatagtccacgctctaccttcttattggccttcagcccagacaggactctcttagcctccacccatgtgaaccataatatctatattacggaggtgaagactggcaagtgtgttcattccctgattggacaccgccgtactccatggtgtgtcacttttcatcccaccatctcaggccttattgcttctggctgcctagatggggaggttaggatttgggatttacacggtggcagtgaaagctggttcacagatagcaacaatgccattgcctccctggctttccaccctacggctcagctcctgctgattgccactgccaatgagatccacttctgggactggagtcgacgggaaccctttgctgtggtgaagacagctagtgagatggaacgggtccgtctggtgagatttgatccacttggacactacttactcacagcaattgttaacccctctaatcaacagggtgatgacgaaccagagatccccatagatggaacagaattatcccactaccgtcagcgtgccctcctgcaatcacagccagttcgccggacgcctctcctccacaatttcctgcacatgctgtcctcccgctcttctggcatccagaccgagcccttccatcccccggagcaggcctcgtcaacgcagcaggaccagggcctcctgaaccggccgtctgccttcagtacagtccagagcagcactgccggcaacacgctccgcaacctcagtctgggtcctacccgccgctctttgggagggcctctgtctagccacccttctaggtatcaccgagaaatagctcctgggttgacaggatctgagtggacccggacagtactcagtctgaactcccgctctgaggcggaatccatgcccccgcccagaaccagtgcctcttcggtgagtttgctgtctgtgctgagacagcaggaaggtggctctcaggcatctgtgtacacttcagccacagaagggaggggttttccggcatcagggttggcaactgagtcagatggagggaatggctccagccaaaacaactcgggcagcattcgccatgagcttcagtgtgacctgagacgcttctttctggagtatgaccggcttcaggagctggatcagagcctgagtggggaagctccccagacccaacaggcccaggaaatgctcaacaataacattgaatctgagaggccaggcccttcccaccagcccaccccacacagcagtgagaacaactccaacctgtcccgtggccacctgaatcgctgtcgtgcttgccacaatctcctgaccttcaacaacgataccctgcgctgggaaagaaccacacctaactactcctctggcgaggctagttcctcttggcaggtccccagctcctttgagagtgtgccatcaagtggcagccagttgccacctctcgagcggactgagggccaaacgcccagctccagcaggctggagttgagcagctctgctagtccgcaggaggagaggactgtgggggtggcctttaaccaggagacaggccactgggaaagaatttacacccagtccagcagatctggaactgtgtcacaggaggccttacatcaggatatgcctgaggagagctctgaggaggattcactcaggagacggagtcttgctctgtcacctaggctggagtacagcggcgctatcttggctcactgcaagctccgcctcccaggttcatgccattctcctgcctcagcttcccaagtagctgggactacgggagcccaccaccacgcccggctaatttttgcatttttagtagagatggagtttcaccatgttagccaggctggtctcgaactcctgacctcaggtgatctgcccacctcggcctcccaaagtgctgggattacaggcgtgagccaccgcgcctggccgaggctgctggaatcttccctcatttcattatcccgttatgatggagcaggatccagagagcacccaatttacccagacccagcgagattatctcctgctgcatactacgcccagaggatgatccagtatctctcacggagagacagtattcgccagcgctccatgcgctaccaacagaaccgtctccgttcttccacctcctcctcttcctcagacaaccagggtccatcagtagagggaaccgacttggaatttgaggactttgaggacaatggtgacagatccaggcaccgagctccacgcaatgcccggatgtctgcaccttcgcttggacgctttgtcccaaggcgtttcttgctgcctgagtacttgccttatgctgggatttttcatgaacgtggacagcctggcttggctactcactcttctgttaacagggtcctggcaggggcagtgatcggtgatggacagtctgctgtggccagtaacattgccaatactacctaccggctccagtggtgggacttcactaagtttgacctccctgaaatcagtaatgcttccgtgaatgtgctggtgcagaactgcaagatctacaatgatgccagctgtgacatttctgcagatggccagctcctggcagctttcatccccagcagccagaggggctttcctgatgaaggcatcctggcagtgtactccctggccccccataacctgggcgaaatgctctacaccaagcgatttggtcccaatgccatttcggtgagcctgtccccaatgggcagatatgtaatggtgggcttggcctcacgaaggatcctgctgcacccctccacagagcacatggtggcccaggtcttcaggctgcaacaggcccatggtggagagacctccatgaggagagttttcaacgtcctttatcccatgcctgccgaccagcggagacatgtcagtatcaactctgcccgttggctgcctgagccagggcttggcttggcctatggtactaacaaaggagacctggtgatctgccgaccagaggccttaaactctggtgttgagtactactgggaccagctgaacgagacggtcttcactgtccattccaacagcaggagcagcgagcggcctggaaccagcagagccacatggaggacagacagagacatggggctgatgaatgccattgggcttcagccccggaaccctgccacctcagtgacatctcagggcacccagactctggcccttcagctgcagaatgccgaaacacagactgagagggaggtgccggagccagggacagccgcctcaggtcctggtgaaggtgagggttcagagtatggtgccagtggagaagatgcgctcagcaggatccagaggctgatggcggagggcggcatgacagccgtggtgcagcgggagcagagcaccaccatggcctccatgggcggcttcggcaacaacatcatcgtcagccaccgcattcaccgcagctctcagacgggcactgaacctggtgccgcccacacctcctcaccccagccctccacctctcggggactgctcccagaggccgggcaactggcagagcgaggcctaagcccccggacagcttcctgggaccagcctggtacccctgggcgggagccaacccagccaaccctgccctcttcctcccctgtccccattcctgtttcccttcccagcgctgagggaccaaccctccactgcgagttgaccaataacaaccaccttctggatggtggcagcagcaggggggacgctgcaggccctaggggagaaccacggaacaggtagagacaaacgttgcactggtgcctcccctcgaaccgccaagcagaaaccggacctcacagctgactgggaactggacatgtggaagagctgctggctgcatcagggaacaggaggaggaagagggtcagggtggagaggaagatcagtcagtgggcacaagacagtcaaatgggcaaggcctgcctcggggaactagaaccttccaggatctggagcccgggagagccacactgtgggcttaatgtgaatagaggaacaagtgggtatctctgccaggcaccccactttctcctagtaacatgggctcaggggactcagccctggacagagagcctccagagagtgaacagtcttccagatctgggccaatcatcctggacagaggcccgcgaggcagctttgccctgtccacctgttgggtgggcagagccaccaggaacccagacaccacctccaactctgagccttccagagcttcagcctctcttcgtcgtcttaccccactgaaaccaacagggatcgggccaggctcccagattcttgaggacagggacttcggcatttactaatgggggactactgtggggtaagggggcgcctgcttgcctgatacaggatggggtcaagggacagtgggcaggtcctcactcaggagtggggggtgtaggctggccagcccccagggcttgtccaccagtcttctccccgcaaggccctcagagcagcgcctgtgggtgtcagtattacctgagcctaggccaaagctagcccaaggctggggaaggggaggagactccaggtcagaatgtgaggtctcagtctgtgatttaaggtgttgcatgtggactcttaactgtacgtgtagtttctagtggagaaatcaaggctctgatcattttgtttttagtatgaaaatgtgatttcctttctgtttgtaactcatcatagaaacattgtggtgggaggagaggggatagtctacagctaatgagggaaacaccaaagatcacatcattaaaatgatgacatgcccctc

SEQ ID NO: 340 - protein, 1301 aa, Homo sapiens
MKVVPEKNAVRILWGRERGARAMGAQRLLQELVEDKTRWMKWEGKRVELPDSPRSTFLLAFSPDRTLLASTHVNHNIYITEVKTGKCVHSLIGHRRTPWCVTFHPTISGLIASGCLDGEVRIWDLHGGSESWFTDSNNAIASLAFHPTAQLLLIATANEIHFWDWSRREPFAVVKTASEMERVRLVRFDPLGHYLLTAIVNPSNQQGDDEPEIPIDGTELSHYRQRALLQSQPVRRTPLLHNFLHMLSSRSSGIQTEPFHPPEQASSTQQDQGLLNRPSAFSTVQSSTAGNTLRNLSLGPTRRSLGGPLSSHPSRYHREIAPGLTGSEWTRTVLSLNSRSEAESMPPPRTSASSVSLLSVLRQQEGGSQASVYTSATEGRGFPASGLATESDGGNGSSQNNSGSIRHELQCDLRRFFLEYDRLQELDQSLSGEAPQTQQAQEMLNNNIESERPGPSHQPTPHSSENNSNLSRGHLNRCRACHNLLTFNNDTLRWERTTPNYSSGEASSSWQVPSSFESVPSSGSQLPPLERTEGQTPSSSRLELSSSASPQEERTVGVAFNQETGHWERIYTQSSRSGTVSQEALHQDMPEESSEEDSLRRRSLALSPRLEYSGAILAHCKLRLPGSCHSPASASQVAGTTGAHHHARLIFAFLVEMEFHHVSQAGLELLTSGDLPTSASQSAGITGVSHRAWPRLLESSLISLSRYDGAGSREHPIYPDPARLSPAAYYAQRMIQYLSRRDSIRQRSMRYQQNRLRSSTSSSSSDNQGPSVEGTDLEFEDFEDNGDRSRHRAPRNARMSAPSLGRFVPRRFLLPEYLPYAGIFHERGQPGLATHSSVNRVLAGAVIGDGQSAVASNIANTTYRLQWWDFTKFDLPEISNASVNVLVQNCKIYNDASCDISADGQLLAAFIPSSQRGFPDEGILAVYSLAPHNLGEMLYTKRFGPNAISVSLSPMGRYVMVGLASRRILLHPSTEHMVAQVFRLQQAHGGETSMRRVFNVLYPMPADQRRHVSINSARWLPEPGLGLAYGTNKGDLVICRPEALNSGVEYYWDQLNETVFTVHSNSRSSERPGTSRATWRTDRDMGLMNAIGLQPRNPATSVTSQGTQTLALQLQNAETQTEREVPEPGTAASGPGEGEGSEYGASGEDALSRIQRLMAEGGMTAVVQREQSTTMASMGGFGNNIIVSHRIHRSSQTGTEPGAAHTSSPQPSTSRGLLPEAGQLAERGLSPRTASWDQPGTPGREPTQPTLPSSSPVPIPVSLPSAEGPTLHCELTNNNHLLDGGSSRGDAAGPRGEPRNR

SEQ ID NO: 341 - DNA, 5023 bp, Homo sapiens
aggggattaatgaagagccaccagactatctttatggagaatctagattgggaagttaagctaagaatgtgcatttttgaaaaagtttttatggtagaagagaatgtatatcagaggaaagaatgtagagaagaaagcaacattgtccactgggaattgataagttctgcgtagaatttagagttataaggactatctcattggctcctaatgaatgctaaataacaaatggaaattgctatttccatgaggacaacttacaaggacctgtatggcctcattttagctgcttcagtgtgttggagctgttacttgctccttcatttcctgggcctggtgtgacagtggctactgagcgccatgaaggttgtcccagaaaagaatgctgtccggatactctgggggcgagaacggggtgctcgggccatgggagctcagcggcttctgcaggagctggtagaagataaaacccggtggatgaaatgggagggcaagagagtagaactgccggatagtccacgctctaccttcttattggccttcagcccagacaggactctcttagcctccacccatgtgaaccataatatctatattacggaggtgaagactggcaagtgtgttcattccctgattggacaccgccgtactccatggtgtgtcacttttcatcccaccatctcaggccttattgcttctggctgcctagatggggaggttaggatttgggatttacacggtggcagtgaaagctggttcacagatagcaacaatgccattgcctccctggctttccaccctacggctcagctcctgctgattgccactgccaatgagatccacttctgggactggagtcgacgggaaccctttgctgtggtgaagacagctagtgagatggaacgggtccgtctggtgagatttgatccacttggacactacttactcacagcaattgttaacccctctaatcaacagggtgatgacgaaccagagatccccatagatggaacagaattatcccactaccgtcagcgtgccctcctgcaatcacagccagttcgccggacgcctctcctccacaatttcctgcacatgctgtcctcccgctcttctggcatccagaccgagcccttccatcccccggagcaggcctcgtcaacgcagcaggaccagggcctcctgaaccggccgtctgccttcagtacagtccagagcagcactgccggcaacacgctccgcaacctcagtctgggtcctacccgccgctctttgggagggcctctgtctagccacccttctaggtatcaccgagaaatagctcctgggttgacaggatctgagtggacccggacagtactcagtctgaactcccgctctgaggcggaatccatgcccccgcccagaaccagtgcctcttcggtgagtttgctgtctgtgctgagacagcaggaaggtggctctcaggcatctgtgtacacttcagccacagaagggaggggttttccggcatcagggttggcaactgagtcagatggagggaatggctccagccaaaacaactcgggcagcattcgccatgagcttcagtgtgacctgagacgcttctttctggagtatgaccggcttcaggagctggatcagagcctgagtggggaagctccccagacccaacaggcccaggaaatgctcaacaataacattgaatctgagaggccaggcccttcccaccagcccaccccacacagcagtgagaacaactccaacctgtcccgtggccacctgaatcgctgtcgtgcttgccacaatctcctgaccttcaacaacgataccctgcgctgggaaagaaccacacctaactactcctctggcgaggctagttcctcttggcaggtccccagctcctttgagagtgtgccatcaagtggcagccagttgccacctctcgagcggactgagggccaaacgcccagctccagcaggctggagttgagcagctctgctagtccgcaggaggagaggactgtgggggtggcctttaaccaggagacaggccactgggaaagaatttacacccagtccagcagatctggaactgtgtcacaggaggccttacatcaggatatgcctgaggagagctctgaggaggattcactcaggaggaggctgctggaatcttccctcatttcattatcccgttatgatggagcaggatccagagagcacccaatttacccagacccagcgagattatctcctgctgcatactacgcccagaggatgatccagtatctctcacggagagacagtattcgccagcgctccatgcgctaccaacagaaccgtctccgttcttccacctcctcctcttcctcagacaaccagggtccatcagtagagggaaccgacttggaatttgaggactttgaggacaatggtgacagatccaggcaccgagctccacgcaatgcccggatgtctgcaccttcgcttggacgctttgtcccaaggcgtttcttgctgcctgagtacttgccttatgctgggatttttcatgaacgtggacagcctggcttggctactcactcttctgttaacagggtcctggcaggggcagtgatcggtgatggacagtctgctgtggccagtaacattgccaatactacctaccggctccagtggtgggacttcactaagtttgacctccctgaaatcagtaatgcttccgtgaatgtgctggtgcagaactgcaagatctacaatgatgccagctgtgacatttctgcagatggccagctcctggcagctttcatccccagcagccagaggggctttcctgatgaaggcatcctggcagtgtactccctggccccccataacctgggcgaaatgctctacaccaagcgatttggtcccaatgccatttcggtgagcctgtccccaatgggcagatatgtaatggtgggcttggcctcacgaaggatcctgctgcacccctccacagagcacatggtggcccaggtcttcaggctgcaacaggcccatggtggagagacctccatgaggagagttttcaacgtcctttatcccatgcctgccgaccagcggagacatgtcagtatcaactctgcccgttggctgcctgagccagggcttggcttggcctatggtactaacaaaggagacctggtgatctgccgaccagaggccttaaactctggtgttgagtactactgggaccagctgaacgagacggtcttcactgtccattccaacagcaggagcagcgagcggcctggaaccagcagagccacatggaggacagacagagacatggggctgatgaatgccattgggcttcagccccggaaccctgccacctcagtgacatctcagggcacccagactctggcccttcagctgcagaatgccgaaacacagactgagagggaggtgccggagccagggacagccgcctcaggtcctggtgaaggtgagggttcagagtatggtgccagtggagaagatgcgctcagcaggatccagaggctgatggcggagggcggcatgacagccgtggtgcagcgggagcagagcaccaccatggcctccatgggcggcttcggcaacaacatcatcgtcagccaccgcattcaccgcagctctcagacgggcactgaacctggtgccgcccacacctcctcaccccagccctccacctctcggggactgctcccagaggccgggcaactggcagagcgaggcctaagcccccggacagcttcctgggaccagcctggtacccctgggcgggagccaacccagccaaccctgccctcttcctcccctgtccccattcctgtttcccttcccagcgctgagggaccaaccctccactgcgagttgaccaataacaaccaccttctggatggtggcagcagcaggggggacgctgcaggccctaggggagaaccacggaacaggtagagacaaacgttgcactggtgcctcccctcgaaccgccaagcagaaaccggacctcacagctgactgggaactggacatgtggaagagctgctggctgcatcagggaacaggaggaggaagagggtcagggtggagaggaagatcagtcagtgggcacaagacagtcaaatgggcaaggcctgcctcggggaactagaaccttccaggatctggagcccgggagagccacactgtgggcttaatgtgaatagaggaacaagtgggtatctctgccaggcaccccactttctcctagtaacatgggctcaggggactcagccctggacagagagcctccagagagtgaacagtcttccagatctgggccaatcatcctggacagaggcccgcgaggcagctttgccctgtccacctgttgggtgggcagagccaccaggaacccagacaccacctccaactctgagccttccagagcttcagcctctcttcgtcgtcttaccccactgaaaccaacagggatcgggccaggctcccagattcttgaggacagggacttcggcatttactaatgggggactactgtggggtaagggggcgcctgcttgcctgatacaggatggggtcaagggacagtgggcaggtcctcactcaggagtggggggtgtaggctggccagcccccagggcttgtccaccagtcttctccccgcaaggccctcagagcagcgcctgtgggtgtcagtattacctgagcctaggccaaagctagcccaaggctggggaaggggaggagactccaggtcagaatgtgaggtctcagtctgtgatttaaggtgttgcatgtggactcttaactgtacgtgtagtttctagtggagaaatcaaggctctgatcattttgtttttagtatgaaaatgtgatttcctttctgtttgtaactcatcatagaaacattgtggtgggaggagaggggatagtctacagctaatgagggaaacaccaaagatcacatcattaaaatgatgacatgcccctc

SEQ ID NO: 342 - protein, 1208 aa, Homo sapiens
MKVVPEKNAVRILWGRERGARAMGAQRLLQELVEDKTRWMKWEGKRVELPDSPRSTFLLAFSPDRTLLASTHVNHNIYITEVKTGKCVHSLIGHRRTPWCVTFHPTISGLIASGCLDGEVRIWDLHGGSESWFTDSNNAIASLAFHPTAQLLLIATANEIHFWDWSRREPFAVVKTASEMERVRLVRFDPLGHYLLTAIVNPSNQQGDDEPEIPIDGTELSHYRQRALLQSQPVRRTPLLHNFLHMLSSRSSGIQTEPFHPPEQASSTQQDQGLLNRPSAFSTVQSSTAGNTLRNLSLGPTRRSLGGPLSSHPSRYHREIAPGLTGSEWTRTVLSLNSRSEAESMPPPRTSASSVSLLSVLRQQEGGSQASVYTSATEGRGFPASGLATESDGGNGSSQNNSGSIRHELQCDLRRFFLEYDRLQELDQSLSGEAPQTQQAQEMLNNNIESERPGPSHQPTPHSSENNSNLSRGHLNRCRACHNLLTFNNDTLRWERTTPNYSSGEASSSWQVPSSFESVPSSGSQLPPLERTEGQTPSSSRLELSSSASPQEERTVGVAFNQETGHWERIYTQSSRSGTVSQEALHQDMPEESSEEDSLRRRLLESSLISLSRYDGAGSREHPIYPDPARLSPAAYYAQRMIQYLSRRDSIRQRSMRYQQNRLRSSTSSSSSDNQGPSVEGTDLEFEDFEDNGDRSRHRAPRNARMSAPSLGRFVPRRFLLPEYLPYAGIFHERGQPGLATHSSVNRVLAGAVIGDGQSAVASNIANTTYRLQWWDFTKFDLPEISNASVNVLVQNCKIYNDASCDISADGQLLAAFIPSSQRGFPDEGILAVYSLAPHNLGEMLYTKRFGPNAISVSLSPMGRYVMVGLASRRILLHPSTEHMVAQVFRLQQAHGGETSMRRVFNVLYPMPADQRRHVSINSARWLPEPGLGLAYGTNKGDLVICRPEALNSGVEYYWDQLNETVFTVHSNSRSSERPGTSRATWRTDRDMGLMNAIGLQPRNPATSVTSQGTQTLALQLQNAETQTEREVPEPGTAASGPGEGEGSEYGASGEDALSRIQRLMAEGGMTAVVQREQSTTMASMGGFGNNIIVSHRIHRSSQTGTEPGAAHTSSPQPSTSRGLLPEAGQLAERGLSPRTASWDQPGTPGREPTQPTLPSSSPVPIPVSLPSAEGPTLHCELTNNNHLLDGGSSRGDAAGPRGEPRNR

SEQ ID NO: 343 - DNA, 5206 bp, Homo sapiens
aggggattaatgaagagccaccagactatctttatggagaatctagattgggaagttaagctaagaatgtgcatttttgaaaaagtttttatggtagaagagaatgtatatcagaggaaagaatgtagagaagaaagcaacattgtccactgggaattgataagttctgcgtagaatttagagttataaggactatctcattggctcctaatgaatgctaaataacaaatggaaattgctatttccatgaggacaacttacaaggacctgtatggcctcattttagctgcttcagtgtgttggagctgttacttgctccttcatttcctgggcctggtgtgacagtggctactgagcgccatgaaggttgtcccagaaaagaatgctgtccggatactctgggggcgagaacggggtgctcgggccatgggagctcagcggcttctgcaggagctggtagaagataaaacccggtggatgaaatgggagggcaagagagtagaactgccggatagtccacgctctaccttcttattggccttcagcccagacaggactctcttagcctccacccatgtgaaccataatatctatattacggaggtgaagactggcaagtgtgttcattccctgattggacaccgccgtactccatggtgtgtcacttttcatcccaccatctcaggccttattgcttctggctgcctagatggggaggttaggatttgggatttacacggtggcagtgaaagctggttcacagatagcaacaatgccattgcctccctggctttccaccctacggctcagctcctgctgattgccactgccaatgagatccacttctgggactggagtcgacgggaaccctttgctgtggtgaagacagctagtgagatggaacgggtccgtctggtgagatttgatccacttggacactacttactcacagcaattgttaacccctctaatcaacagggtgatgacgaaccagagatccccatagatggaacagaattatcccactaccgtcagcgtgccctcctgcaatcacagccagttcgccggacgcctctcctccacaatttcctgcacatgctgtcctcccgctcttctggcatccaggtgggagagcaaagcacagtgcaagattctgctaccccctcacccccaccgcctccccctcagccctccacggagcgccccaggacttccgcttacatcaggctccgacagcgggtcagttaccccacagctgagtgctgccagcaccttgggatcctgtgcctttgcagccgctgctctggcactcgagttccttccctcttgccacaccaggacagtgtcccccctgcttctgccagagctactaccccttccttttcttttgtacagaccgagcccttccatcccccggagcaggcctcgtcaacgcagcaggaccagggcctcctgaaccggccgtctgccttcagtacagtccagagcagcactgccggcaacacgctccgcaacctcagtctgggtcctacccgccgctctttgggagggcctctgtctagccacccttctaggtatcaccgagaaatagctcctgggttgacaggatctgagtggacccggacagtactcagtctgaactcccgctctgaggcggaatccatgcccccgcccagaaccagtgcctcttcggtgagtttgctgtctgtgctgagacagcaggaaggtggctctcaggcatctgtgtacacttcagccacagaagggaggggttttccggcatcagggttggcaactgagtcagatggagggaatggctccagccaaaacaactcgggcagcattcgccatgagcttcagtgtgacctgagacgcttctttctggagtatgaccggcttcaggagctggatcagagcctgagtggggaagctccccagacccaacaggcccaggaaatgctcaacaataacattgaatctgagaggccaggcccttcccaccagcccaccccacacagcagtgagaacaactccaacctgtcccgtggccacctgaatcgctgtcgtgcttgccacaatctcctgaccttcaacaacgataccctgcgctgggaaagaaccacacctaactactcctctggcgaggctagttcctcttggcaggtccccagctcctttgagagtgtgccatcaagtggcagccagttgccacctctcgagcggactgagggccaaacgcccagctccagcaggctggagttgagcagctctgctagtccgcaggaggagaggactgtgggggtggcctttaaccaggagacaggccactgggaaagaatttacacccagtccagcagatctggaactgtgtcacaggaggccttacatcaggatatgcctgaggagagctctgaggaggattcactcaggagattatctcctgctgcatactacgcccagaggatgatccagtatctctcacggagagacagtattcgccagcgctccatgcgctaccaacagaaccgtctccgttcttccacctcctcctcttcctcagacaaccagggtccatcagtagagggaaccgacttggaatttgaggactttgaggacaatggtgacagatccaggcaccgagctccacgcaatgcccggatgtctgcaccttcgcttggacgctttgtcccaaggcgtttcttgctgcctgagtacttgccttatgctgggatttttcatgaacgtggacagcctggcttggctactcactcttctgttaacagggtcctggcaggggcagtgatcggtgatggacagtctgctgtggccagtaacattgccaatactacctaccggctccagtggtgggacttcactaagtttgacctccctgaaatcagtaatgcttccgtgaatgtgctggtgcagaactgcaagatctacaatgatgccagctgtgacatttctgcagatggccagctcctggcagctttcatccccagcagccagaggggctttcctgatgaaggcatcctggcagtgtactccctggccccccataacctgggcgaaatgctctacaccaagcgatttggtcccaatgccatttcggtgagcctgtccccaatgggcagatatgtaatggtgggcttggcctcacgaaggatcctgctgcacccctccacagagcacatggtggcccaggtcttcaggctgcaacaggcccatggtggagagacctccatgaggagagttttcaacgtcctttatcccatgcctgccgaccagcggagacatgtcagtatcaactctgcccgttggctgcctgagccagggcttggcttggcctatggtactaacaaaggagacctggtgatctgccgaccagaggccttaaactctggtgttgagtactactgggaccagctgaacgagacggtcttcactgtccattccaacagcaggagcagcgagcggcctggaaccagcagagccacatggaggacagacagagacatggggctgatgaatgccattgggcttcagccccggaaccctgccacctcagtgacatctcagggcacccagactctggcccttcagctgcagaatgccgaaacacagactgagagggaggtgccggagccagggacagccgcctcaggtcctggtgaaggtgagggttcagagtatggtgccagtggagaagatgcgctcagcaggatccagaggctgatggcggagggcggcatgacagccgtggtgcagcgggagcagagcaccaccatggcctccatgggcggcttcggcaacaacatcatcgtcagccaccgcattcaccgcagctctcagacgggcactgaacctggtgccgcccacacctcctcaccccagccctccacctctcggggactgctcccagaggccgggcaactggcagagcgaggcctaagcccccggacagcttcctgggaccagcctggtacccctgggcgggagccaacccagccaaccctgccctcttcctcccctgtccccattcctgtttcccttcccagcgctgagggaccaaccctccactgcgagttgaccaataacaaccaccttctggatggtggcagcagcaggggggacgctgcaggccctaggggagaaccacggaacaggtagagacaaacgttgcactggtgcctcccctcgaaccgccaagcagaaaccggacctcacagctgactgggaactggacatgtggaagagctgctggctgcatcagggaacaggaggaggaagagggtcagggtggagaggaagatcagtcagtgggcacaagacagtcaaatgggcaaggcctgcctcggggaactagaaccttccaggatctggagcccgggagagccacactgtgggcttaatgtgaatagaggaacaagtgggtatctctgccaggcaccccactttctcctagtaacatgggctcaggggactcagccctggacagagagcctccagagagtgaacagtcttccagatctgggccaatcatcctggacagaggcccgcgaggcagctttgccctgtccacctgttgggtgggcagagccaccaggaacccagacaccacctccaactctgagccttccagagcttcagcctctcttcgtcgtcttaccccactgaaaccaacagggatcgggccaggctcccagattcttgaggacagggacttcggcatttactaatgggggactactgtggggtaagggggcgcctgcttgcctgatacaggatggggtcaagggacagtgggcaggtcctcactcaggagtggggggtgtaggctggccagcccccagggcttgtccaccagtcttctccccgcaaggccctcagagcagcgcctgtgggtgtcagtattacctgagcctaggccaaagctagcccaaggctggggaaggggaggagactccaggtcagaatgtgaggtctcagtctgtgatttaaggtgttgcatgtggactcttaactgtacgtgtagtttctagtggagaaatcaaggctctgatcattttgtttttagtatgaaaatgtgatttcctttctgtttgtaactcatcatagaaacattgtggtgggaggagaggggatagtctacagctaatgagggaaacaccaaagatcacatcattaaaatgatgacatgcccctc

SEQ ID NO: 344 - protein, 1269 aa, Homo sapiens
MKVVPEKNAVRILWGRERGARAMGAQRLLQELVEDKTRWMKWEGKRVELPDSPRSTFLLAFSPDRTLLASTHVNHNIYITEVKTGKCVHSLIGHRRTPWCVTFHPTISGLIASGCLDGEVRIWDLHGGSESWFTDSNNAIASLAFHPTAQLLLIATANEIHFWDWSRREPFAVVKTASEMERVRLVRFDPLGHYLLTAIVNPSNQQGDDEPEIPIDGTELSHYRQRALLQSQPVRRTPLLHNFLHMLSSRSSGIQVGEQSTVQDSATPSPPPPPPQPSTERPRTSAYIRLRQRVSYPTAECCQHLGILCLCSRCSGTRVPSLLPHQDSVPPASARATTPSFSFVQTEPFHPPEQASSTQQDQGLLNRPSAFSTVQSSTAGNTLRNLSLGPTRRSLGGPLSSHPSRYHREIAPGLTGSEWTRTVLSLNSRSEAESMPPPRTSASSVSLLSVLRQQEGGSQASVYTSATEGRGFPASGLATESDGGNGSSQNNSGSIRHELQCDLRRFFLEYDRLQELDQSLSGEAPQTQQAQEMLNNNIESERPGPSHQPTPHSSENNSNLSRGHLNRCRACHNLLTFNNDTLRWERTTPNYSSGEASSSWQVPSSFESVPSSGSQLPPLERTEGQTPSSSRLELSSSASPQEERTVGVAFNQETGHWERIYTQSSRSGTVSQEALHQDMPEESSEEDSLRRLSPAAYYAQRMIQYLSRRDSIRQRSMRYQQNRLRSSTSSSSSDNQGPSVEGTDLEFEDFEDNGDRSRHRAPRNARMSAPSLGRFVPRRFLLPEYLPYAGIFHERGQPGLATHSSVNRVLAGAVIGDGQSAVASNIANTTYRLQWWDFTKFDLPEISNASVNVLVQNCKIYNDASCDISADGQLLAAFIPSSQRGFPDEGILAVYSLAPHNLGEMLYTKRFGPNAISVSLSPMGRYVMVGLASRRILLHPSTEHMVAQVFRLQQAHGGETSMRRVFNVLYPMPADQRRHVSINSARWLPEPGLGLAYGTNKGDLVICRPEALNSGVEYYWDQLNETVFTVHSNSRSSERPGTSRATWRTDRDMGLMNAIGLQPRNPATSVTSQGTQTLALQLQNAETQTEREVPEPGTAASGPGEGEGSEYGASGEDALSRIQRLMAEGGMTAVVQREQSTTMASMGGFGNNIIVSHRIHRSSQTGTEPGAAHTSSPQPSTSRGLLPEAGQLAERGLSPRTASWDQPGTPGREPTQPTLPSSSPVPIPVSLPSAEGPTLHCELTNNNHLLDGGSSRGDAAGPRGEPRNR

SEQ ID NO: 345 - DNA, 3508 bp, Homo sapiens
atgaggacaacttacaaggacctgtatggcctcattttagctgcttcagtgtgttggagctgttacttgctccttcatttcctgagacgcttctttctggagtatgaccggcttcaggagctggatcagagcctgagtggggaagctccccagacccaacaggcccaggaaatgctcaacaataacattgaatctgagaggccaggcccttcccaccagcccaccccacacagcagtgagaacaactccaacctgtcccgtggccacctgaatcgctgtcgtgcttgccacaatctcctgaccttcaacaacgataccctgcgctgggaaagaaccacacctaactactcctctggcgaggctagttcctcttggcaggtccccagctcctttgagagtgtgccatcaagtggcagccagttgccacctctcgagcggactgagggccaaacgcccagctccagcaggctggagttgagcagctctgctagtccgcaggaggagaggactgtgggggtggcctttaaccaggagacaggccactgggaaagaatttacacccagtccagcagatctggaactgtgtcacaggaggccttacatcaggatatgcctgaggagagctctgaggaggattcactcaggaggaggctgctggaatcttccctcatttcattatcccgttatgatggagcaggatccagagagcacccaatttacccagacccagcgagattatctcctgctgcatactacgcccagaggatgatccagtatctctcacggagagacagtattcgccagcgctccatgcgctaccaacagaaccgtctccgttcttccacctcctcctcttcctcagacaaccagggtccatcagtagagggaaccgacttggaatttgaggactttgaggacaatggtgacagatccaggcaccgagctccacgcaatgcccggatgtctgcaccttcgcttggacgctttgtcccaaggcgtttcttgctgcctgagtacttgccttatgctgggatttttcatgaacgtggacagcctggcttggctactcactcttctgttaacagggtcctggcaggggcagtgatcggtgatggacagtctgctgtggccagtaacattgccaatactacctaccggctccagtggtgggacttcactaagtttgacctccctgaaatcagtaatgcttccgtgaatgtgctggtgcagaactgcaagatctacaatgatgccagctgtgacatttctgcagatggccagctcctggcagctttcatccccagcagccagaggggctttcctgatgaaggcatcctggcagtgtactccctggccccccataacctgggcgaaatgctctacaccaagcgatttggtcccaatgccatttcggtgagcctgtccccaatgggcagatatgtaatggtgggcttggcctcacgaaggatcctgctgcacccctccacagagcacatggtggcccaggtcttcaggctgcaacaggcccatggtggagagacctccatgaggagagttttcaacgtcctttatcccatgcctgccgaccagcggagacatgtcagtatcaactctgcccgttggctgcctgagccagggcttggcttggcctatggtactaacaaaggagacctggtgatctgccgaccagaggccttaaactctggtgttgagtactactgggaccagctgaacgagacggtcttcactgtccattccaacagcaggagcagcgagcggcctggaaccagcagagccacatggaggacagacagagacatggggctgatgaatgccattgggcttcagccccggaaccctgccacctcagtgacatctcagggcacccagactctggcccttcagctgcagaatgccgaaacacagactgagagggaggtgccggagccagggacagccgcctcaggtcctggtgaaggtgagggttcagagtatggtgccagtggagaagatgcgctcagcaggatccagaggctgatggcggagggcggcatgacagccgtggtgcagcgggagcagagcaccaccatggcctccatgggcggcttcggcaacaacatcatcgtcagccaccgcattcaccgcagctctcagacgggcactgaacctggtgccgcccacacctcctcaccccagccctccacctctcggggactgctcccagaggccgggcaactggcagagcgaggcctaagcccccggacagcttcctgggaccagcctggtacccctgggcgggagccaacccagccaaccctgccctcttcctcccctgtccccattcctgtttcccttcccagcgctgagggaccaaccctccactgcgagttgaccaataacaaccaccttctggatggtggcagcagcaggggggacgctgcaggccctaggggagaaccacggaacaggtagagacaaacgttgcactggtgcctcccctcgaaccgccaagcagaaaccggacctcacagctgactgggaactggacatgtggaagagctgctggctgcatcagggaacaggaggaggaagagggtcagggtggagaggaagatcagtcagtgggcacaagacagtcaaatgggcaaggcctgcctcggggaactagaaccttccaggatctggagcccgggagagccacactgtgggcttaatgtgaatagaggaacaagtgggtatctctgccaggcaccccactttctcctagtaacatgggctcaggggactcagccctggacagagagcctccagagagtgaacagtcttccagatctgggccaatcatcctggacagaggcccgcgaggcagctttgccctgtccacctgttgggtgggcagagccaccaggaacccagacaccacctccaactctgagccttccagagcttcagcctctcttcgtcgtcttaccccactgaaaccaacagggatcgggccaggctcccagattcttgaggacagggacttcggcatttactaatgggggactactgtggggtaagggggcgcctgcttgcctgatacaggatggggtcaagggacagtgggcaggtcctcactcaggagtggggggtgtaggctggccagcccccagggcttgtccaccagtcttctccccgcaaggccctcagagcagcgcctgtgggtgtcagtattacctgagcctaggccaaagctagcccaaggctggggaaggggaggagactccaggtcagaatgtgaggtctcagtctgtgatttaaggtgttgcatgtggactcttaactgtacgtgtagtttctagtggagaaatcaaggctctgatcattttgtttttagtatgaaaatgtgatttcctttctgtttgtaactcatcatagaaacattgtggtgggaggagaggggatagtctacagctaatgagggaaacaccaaagatcacatcattaaaatgatgacatgcccctc

SEQ ID NO: 346 - protein, 563 aa, Homo sapiens
MRTTYKDLYGLILAASVCWSCYLLLHFLRRFFLEYDRLQELDQSLSGEAPQTQQAQEMLNNNIESERPGPSHQPTPHSSENNSNLSRGHLNRCRACHNLLTFNNDTLRWERTTPNYSSGEASSSWQVPSSFESVPSSGSQLPPLERTEGQTPSSSRLELSSSASPQEERTVGVAFNQETGHWERIYTQSSRSGTVSQEALHQDMPEESSEEDSLRRRLLESSLISLSRYDGAGSREHPIYPDPARLSPAAYYAQRMIQYLSRRDSIRQRSMRYQQNRLRSSTSSSSSDNQGPSVEGTDLEFEDFEDNGDRSRHRAPRNARMSAPSLGRFVPRRFLLPEYLPYAGIFHERGQPGLATHSSVNRVLAGAVIGDGQSAVASNIANTTYRLQWWDFTKFDLPEISNASVNVLVQNCKIYNDASCDISADGQLLAAFIPSSQRGFPDEGILAVYSLAPHNLGEMLYTKRFGPNAISVSLSPMGRYVMVGLASRRILLHPSTEHMVAQVFRLQQAHGGETSMRRVFNVLYPMPADQRRHVSINSARWLPEPGLGLAYGTNKGDLVICRP

SEQ ID NO: 347 - DNA, 5293 bp, Homo sapiens
aggggattaatgaagagccaccagactatctttatggagaatctagattgggaagttaagctaagaatgtgcatttttgaaaaagtttttatggtagaagagaatgtatatcagaggaaagaatgtagagaagaaagcaacattgtccactgggaattgataagttctgcgtagaatttagagttataaggactatctcattggctcctaatgaatgctaaataacaaatggaaattgctatttccatgaggacaacttacaaggacctgtatggcctcattttagctgcttcagtgtgttggagctgttacttgctccttcatttcctgggcctggtgtgacagtggctactgagcgccatgaaggttgtcccagaaaagaatgctgtccggatactctgggggcgagaacggggtgctcgggccatgggagctcagcggcttctgcaggagctggtagaagataaaacccggtggatgaaatgggagggcaagagagtagaactgccggatagtccacgctctaccttcttattggccttcagcccagacaggactctcttagcctccacccatgtgaaccataatatctatattacggaggtgaagactggcaagtgtgttcattccctgattggacaccgccgtactccatggtgtgtcacttttcatcccaccatctcaggccttattgcttctggctgcctagatggggaggttaggatttgggatttacacggtggcagtgaaagctggttcacagatagcaacaatgccattgcctccctggctttccaccctacggctcagctcctgctgattgccactgccaatgagatccacttctgggactggagtcgacgggaaccctttgctgtggtgaagacagctagtgagatggaacgggtccgtctggtgagatttgatccacttggacactacttactcacagcaattgttaacccctctaatcaacagggtgatgacgaaccagagatccccatagatggaacagaattatcccactaccgtcagcgtgccctcctgcaatcacagccagttcgccggacgcctctcctccacaatttcctgcacatgctgtcctcccgctcttctggcatccaggtgggagagcaaagcacagtgcaagattctgctaccccctcacccccaccgcctccccctcagccctccacggagcgccccaggacttccgcttacatcaggctccgacagcgggtcagttaccccacagctgagtgctgccagcaccttgggatcctgtgcctttgcagccgctgctctggcactcgagttccttccctcttgccacaccaggacagtgtcccccctgcttctgccagagctactaccccttccttttcttttgtacagaccgagcccttccatcccccggagcaggcctcgtcaacgcagcaggaccagggcctcctgaaccggccgtctgccttcagtacagtccagagcagcactgccggcaacacgctccgcaacctcagtctgggtcctacccgccgctctttgggagggcctctgtctagccacccttctaggtatcaccgagaaatagctcctgggttgacaggatctgagtggacccggacagtactcagtctgaactcccgctctgaggcggaatccatgcccccgcccagaaccagtgcctcttcggtgagtttgctgtctgtgctgagacagcaggaaggtggctctcaggcatctgtgtacacttcagccacagaagggaggggttttccggcatcagggttggcaactgagtcagatggagggaatggctccagccaaaacaactcgggcagcattcgccatgagcttcagtgtgacctgagacgcttctttctggagtatgaccggcttcaggagctggatcagagcctgagtggggaagctccccagacccaacaggcccaggaaatgctcaacaataacattgaatctgagaggccaggcccttcccaccagcccaccccacacagcagtgagaacaactccaacctgtcccgtggccacctgaatcgctgtcgtgcttgccacaatctcctgaccttcaacaacgataccctgcgctgggaaagaaccacacctaactactcctctggcgaggctagttcctcttggcaggtccccagctcctttgagagtgtgccatcaagtggcagccagttgccacctctcgagcggactgagggccaaacgcccagctccagcaggctggagttgagcagctctgctagtccgcaggaggagaggactgtgggggtggcctttaaccaggagacaggccactgggaaagaatttacacccagtccagcagatctggaactgtgtcacaggaggccttacatcaggatatgcctgaggagagctctgaggaggattcactcaggaggaggctgctggaatcttccctcatttcattatcccgttatgatggagcaggatccagagagcacccaatttacccagacccagcgagattatctcctgctgcatactacgcccagaggatgatccagtatctctcacggagagacagtattcgccagcgctccatgcgctaccaacagaaccgtctccgttcttccacctcctcctcttcctcagacaaccagggtccatcagtagagggaaccgacttggaatttgaggactttgaggacaatggtgacagatccaggcaccgagctccacgcaatgcccggatgtctgcaccttcgcttggacgctttgtcccaaggcgtttcttgctgcctgagtacttgccttatgctgggatttttcatgaacgtggacagcctggcttggctactcactcttctgttaacagggtcctggcaggggcagtgatcggtgatggacagtctgctgtggccagtaacattgccaatactacctaccggctccagtggtgggacttcactaagtttgacctccctgaaatcagtaatgcttccgtgaatgtgctggtgcagaactgcaagatctacaatgatgccagctgtgacatttctgcagatggccagctcctggcagctttcatccccagcagccagaggggctttcctgatgaaggcatcctggcagtgtactccctggccccccataacctgggcgaaatgctctacaccaagcgatttggtcccaatgccatttcggtgagcctgtccccaatgggcagatatgtaatggtgggcttggcctcacgaaggatcctgctgcacccctccacagagcacatggtggcccaggtcttcaggctgcaacaggcccatggtggagagacctccatgaggagagttttcaacgtcctttatcccatgcctgccgaccagcggagacatgtcagtatcaactctgcccgttggctgcctgagccagggcttggcttggcctatggtactaacaaaggagacctggtgatctgccgaccagaggccttaaactctggtgttgagtactactgggaccagctgaacgagacggtcttcactgtccattccaacagcaggagcagcgagcggcctggaaccagcagagccacatggaggacagacagagacatggggctgatgaatgccattgggcttcagccccggaaccctgccacctcagtgacatctcagggcacccagactctggcccttcagctgcagaatgccgaaacacagactgagagggaggtgccggagccagggacagccgcctcaggtcctggtgaaggtgagggttcagagtatggtgccagtggagaagatgcgctcagcaggatccagaggctgatggcggagggcggcatgacagccgtggtgcagcgggagcagagcaccaccatggcctccatgggcggcttcggcaacaacatcatcgtcagccaccgcattcaccgcagctctcagacgggcactgaacctggtgccgcccacacctcctcaccccagccctccacctctcggggactgctcccagaggccgggcaactggcagagcgaggcctaagcccccggacagcttcctgggaccagcctggtacccctgggcgggagccaacccagccaaccctgccctcttcctcccctgtccccattcctgtttcccttcccagcgctgagggaccaaccctccactgcgagttgaccaataacaaccaccttctggatggtggcagcagcaggggggacgctgcaggccctaggggagaaccacggaacaggtagagacaaacgttgcactggtgcctcccctcgaaccgccaagcagaaaccggacctcacagctgactgggaactggacatgtggaagagctgctggctgcatcagggaacaggaggaggaagagggtcagggtggagaggaagatcagtcagtgggcacaagacagtcaaatgggcaaggcctgcctcggggaactagaaccttccaggatctggagcccgggagagccacactgtgggcttaatgtgaatagaggaacaagtgggtatctctgccaggcaccccactttctcctagtaacatgggctcaggggactcagccctggacagagagcctccagagagtgaacagtcttccagatctgggccaatcatcctggacagaggcccgcgaggcagctttgccctgtccacctgttgggtgggcagagccaccaggaacccagacaccacctccaactctgagccttccagagcttcagcctctcttcgtcgtcttaccccactgaaaccaacagggatcgggccaggctcccagattcttgaggacagggacttcggcatttactaatgggggactactgtggggtaagggggcgcctgcttgcctgatacaggatggggtcaagggacagtgggcaggtcctcactcaggagtggggggtgtaggctggccagcccccagggcttgtccaccagtcttctccccgcaaggccctcagagcagcgcctgtgggtgtcagtattacctgagcctaggccaaagctagcccaaggctggggaaggggaggagactccaggtcagaatgtgaggtctcagtctgtgatttaaggtgttgcatgtggactcttaactgtacgtgtagtttctagtggagaaatcaaggctctgatcattttgtttttagtatgaaaatgtgatttcctttctgtttgtaactcatcatagaaacattgtggtgggaggagaggggatagtctacagctaatgagggaaacaccaaagatcacatcattaaaatgatgacatgcccctc

SEQ ID NO: 348 - protein, 1298 aa, Homo sapiens
MKVVPEKNAVRILWGRERGARAMGAQRLLQELVEDKTRWMKWEGKRVELPDSPRSTFLLAFSPDRTLLASTHVNHNIYITEVKTGKCVHSLIGHRRTPWCVTFHPTISGLIASGCLDGEVRIWDLHGGSESWFTDSNNAIASLAFHPTAQLLLIATANEIHFWDWSRREPFAVVKTASEMERVRLVRFDPLGHYLLTAIVNPSNQQGDDEPEIPIDGTELSHYRQRALLQSQPVRRTPLLHNFLHMLSSRSSGIQVGEQSTVQDSATPSPPPPPPQPSTERPRTSAYIRLRQRVSYPTAECCQHLGILCLCSRCSGTRVPSLLPHQDSVPPASARATTPSFSFVQTEPFHPPEQASSTQQDQGLLNRPSAFSTVQSSTAGNTLRNLSLGPTRRSLGGPLSSHPSRYHREIAPGLTGSEWTRTVLSLNSRSEAESMPPPRTSASSVSLLSVLRQQEGGSQASVYTSATEGRGFPASGLATESDGGNGSSQNNSGSIRHELQCDLRRFFLEYDRLQELDQSLSGEAPQTQQAQEMLNNNIESERPGPSHQPTPHSSENNSNLSRGHLNRCRACHNLLTFNNDTLRWERTTPNYSSGEASSSWQVPSSFESVPSSGSQLPPLERTEGQTPSSSRLELSSSASPQEERTVGVAFNQETGHWERIYTQSSRSGTVSQEALHQDMPEESSEEDSLRRRLLESSLISLSRYDGAGSREHPIYPDPARLSPAAYYAQRMIQYLSRRDSIRQRSMRYQQNRLRSSTSSSSSDNQGPSVEGTDLEFEDFEDNGDRSRHRAPRNARMSAPSLGRFVPRRFLLPEYLPYAGIFHERGQPGLATHSSVNRVLAGAVIGDGQSAVASNIANTTYRLQWWDFTKFDLPEISNASVNVLVQNCKIYNDASCDISADGQLLAAFIPSSQRGFPDEGILAVYSLAPHNLGEMLYTKRFGPNAISVSLSPMGRYVMVGLASRRILLHPSTEHMVAQVFRLQQAHGGETSMRRVFNVLYPMPADQRRHVSINSARWLPEPGLGLAYGTNKGDLVICRPEALNSGVEYYWDQLNETVFTVHSNSRSSERPGTSRATWRTDRDMGLMNAIGLQPRNPATSVTSQGTQTLALQLQNAETQTEREVPEPGTAASGPGEGEGSEYGASGEDALSRIQRLMAEGGMTAVVQREQSTTMASMGGFGNNIIVSHRIHRSSQTGTEPGAAHTSSPQPSTSRGLLPEAGQLAERGLSPRTASWDQPGTPGREPTQPTLPSSSPVPIPVSLPSAEGPTLHCELTNNNHLLDGGSSRGDAAGPRGEPRNR

SEQ ID NO: 349 - DNA, 1245 bp, Homo sapiens; identical to SEQ ID NO: 51

SEQ ID NO: 350 - protein, 414 aa, Homo sapiens; identical to SEQ ID NO: 52

SEQ ID NO: 351 - DNA, 1245 bp, Homo sapiens; identical to SEQ ID NO: 51

SEQ ID NO: 352 - protein, 414 aa, Homo sapiens; identical to SEQ ID NO: 52

SEQ ID NO: 353 - DNA, 1305 bp, Homo sapiens; identical to SEQ ID NO: 55

SEQ ID NO: 354 - protein, 434 aa, Homo sapiens; identical to SEQ ID NO: 56

SEQ ID NO: 355 - DNA, 737 bp, Homo sapiens; identical to SEQ ID NO: 57

SEQ ID NO: 356 - protein, 245 aa, Homo sapiens; identical to SEQ ID NO: 58

SEQ ID NO: 357 - DNA, 1041 bp, Homo sapiens; identical to SEQ ID NO: 59

SEQ ID NO: 358 - protein, 346 aa, Homo sapiens; identical to SEQ ID NO: 60

SEQ ID NO: 359 - DNA, 1245 bp, Homo sapiens; identical to SEQ ID NO: 51

SEQ ID NO: 360 - protein, 414 aa, Homo sapiens; identical to SEQ ID NO: 52

SEQ ID NO: 361 - DNA, 339 bp, Homo sapiens; identical to SEQ ID NO: 63

SEQ ID NO: 362 - protein, 113 aa, Homo sapiens; identical to SEQ ID NO: 64

SEQ ID NO: 363 - DNA, 1401 bp, Homo sapiens
atgctgcgctccacgtccacggtcaccctgctctcgggcggcgccgccaggacgcccggggcgcccagcaggagggcaaatgtttgcagactacggctgaccgtacctcctgagagtccagttcctgagcaatgtgaaaagaagattgagagaaaagagcagcttcttgacctgagcaatggagaacctaccaggaaacttcctcagggtgttgtttatggtgtggtgcgaagatcagatcaaaatcagcagaaagaaatggtggtgtatgggtggtccaccagtcagctgaaagaagagatgaactacatcaaagatgtgagagccactttggaaaaggtgagaaagcgaatgtatggagactatgatgagatgagacagaagattcgacagctcacccaggaactatcagtttcccatgctcagcaggagtatctggagaatcacatccaaacccagtcgtctgccctggatcgttttaatgccatgaactcagccttggcatcagattccattggcctgcaaaaaaccctcgtggatgtgactttggaaaacagcaacattaaggatcaaatcagaaatctgcagcagacgtatgaagcatccatggacaagctgagggaaaagcagaggcagttggaggtagcgcaagttgaaaaccagctgctaaaaatgaaggtggaatcgtcccaagaagccaatgctgaggtgatgcgagagatgaccaagaagctgtacagccagtatgaggagaagctgcaggaagaacagaggaagcacagtgctgagaaggaggctcttttggaagaaaccaatagttttctgaaagcgattgaagaagccaataaaaagatgcaagcagcagagatcagcctagaggagaaagaccagaggatcggggagctggacaggctgattgagcgcatggaaaaggaacgtcatcaactgcaacttcaactcctagaacatgaaacagaaatgtctggggagttaactgattctgacaaggaaaggtatcagcagttggaggaggcatcagccagcctccgtgagcggatcagacacctagatgacatggtgcattgccagcagaagaaagtcaagcagatggtcgaggagattgaatcattaaagaaaaagttgcaacagaaacagctcttaatactgcagcttttagaaaagatatctttcttagaaggagagaataatgaactacaaagcaggttggactatttaacagaaacccaggccaagactgaagtggaaaccagagagataggagtgggctgtgatcttctacccagccaaacaggcaggactcgtgaaattgtgatgccttctaggaactacaccccatacacaagagtcctggagttaaccatgaagaaaactctgacttag

SEQ ID NO: 364 - protein, 466 aa, Homo sapiens
MLRSTSTVTLLSGGAARTPGAPSRRANVCRLRLTVPPESPVPEQCEKKIERKEQLLDLSNGEPTRKLPQGVVYGVVRRSDQNQQKEMVVYGWSTSQLKEEMNYIKDVRATLEKVRKRMYGDYDEMRQKIRQLTQELSVSHAQQEYLENHIQTQSSALDRFNAMNSALASDSIGLQKTLVDVTLENSNIKDQIRNLQQTYEASMDKLREKQRQLEVAQVENQLLKMKVESSQEANAEVMREMTKKLYSQYEEKLQEEQRKHSAEKEALLEETNSFLKAIEEANKKMQAAEISLEEKDQRIGELDRLIERMEKERHQLQLQLLEHETEMSGELTDSDKERYQQLEEASASLRERIRHLDDMVHCQQKKVKQMVEEIESLKKKLQQKQLLILQLLEKISFLEGENNELQSRLDYLTETQAKTEVETREIGVGCDLLPSQTGRTREIVMPSRNYTPYTRVLELTMKKTLT

SEQ ID NO: 365 - DNA, 1248 bp, Homo sapiens
atgctgcgctccacgtccacggtcaccctgctctcgggcggcgccgccaggacgcccggggcgcccagcaggagggcaaatgtttgcagactacggctgaccgtacctcctgagagtccagttcctgagcaatgtgaaaagaagattgagagaaaagagcagcttcttgacctgagcaatggagaacctaccaggaaacttcctcagggtgttgtttatggtgtggtgcgaagatcagatcaaaatcagcagaaagaaatggtggtgtatgggtggtccaccagtcagctgaaagaagagatgaactacatcaaagatgtttcccatgctcagcaggagtatctggagaatcacatccaaacccagtcgtctgccctggatcgttttaatgccatgaactcagccttggcatcagattccattggcctgcaaaaaaccctcgtggatgtgactttggaaaacagcaacattaaggatcaaatcagaaatctgcagcagacgtatgaagcatccatggacaagctgagggaaaagcagaggcagttggaggtagcgcaagttgaaaaccagctgctaaaaatgaaggtggaatcgtcccaagaagccaatgctgaggtgatgcgagagatgaccaagaagctgtacagccagtatgaggagaagctgcaggaagaacagaggaagcacagtgctgagaaggaggctcttttggaagaaaccaatagttttctgaaagcgattgaagaagccaataaaaagatgcaagcagcagagatcagcctagaggagaaagaccagaggatcggggagctggacaggctgattgagcgcatggaaaaggaacgtcatcaactgcaacttcaactcctagaacatgaaacagaaatgtctggggagttaactgattctgacaaggaaaggtatcagcagttggaggaggcatcagccagcctccgtgagcggatcagacacctagatgacatggtgcattgccagcagaagaaagtcaagcagatggtcgaggagaataatgaactacaaagcaggttggactatttaacagaaacccaggccaagactgaagtggaaaccagagagataggagtgggctgtgatcttctacccaggcaaagtagaaaattcgaaaaggtcctcaacgagtttgtacagctgctcccactccctcatcacctcttgtgggcctttggaaatgtatgttggaggagacattttggattgttgcaatga

SEQ ID NO: 366 - protein, 415 aa, Homo sapiens
MLRSTSTVTLLSGGAARTPGAPSRRANVCRLRLTVPPESPVPEQCEKKIERKEQLLDLSNGEPTRKLPQGVVYGVVRRSDQNQQKEMVVYGWSTSQLKEEMNYIKDVSHAQQEYLENHIQTQSSALDRFNAMNSALASDSIGLQKTLVDVTLENSNIKDQIRNLQQTYEASMDKLREKQRQLEVAQVENQLLKMKVESSQEANAEVMREMTKKLYSQYEEKLQEEQRKHSAEKEALLEETNSFLKAIEEANKKMQAAEISLEEKDQRIGELDRLIERMEKERHQLQLQLLEHETEMSGELTDSDKERYQQLEEASASLRERIRHLDDMVHCQQKKVKQMVEENNELQSRLDYLTETQAKTEVETREIGVGCDLLPRQSRKFEKVLNEFVQLLPLPHHLLWAFGNVCWRRHFGLLQ

SEQ ID NO: 367 - DNA, 1092 bp, Homo sapiens
atgtgctcgctgccccgcggcttcgagccccaagctcccgaggacttggcgcagcggagtttggtggagctgcgggaaatgttgaagcgccaggagagacttttgcgcaacgaaaaattcatttgcaaattgcccgacaaaggtaaaaagatctttgactcttttgccaaactgaaagctgccattgcagaatgtgaagaagttagaagaaaaagtgaactgtttaaccctgttagtttagactgtaagctaaggcaaaaagcaattgcagaagttgatgtgggtacagataaggcccagaattctgacccgatacttgatacttcatcactagttcctggatgttcctctgtagataacatcaagtcatctcaaacctcacaaaaccagggacttggacgtcctactcttgaaggtgatgaagagacttcagaggttgagtacacagtgaataagggcccagcttccagcaatagagacagggtaccaccttcatctgaagctagtgagcatcacccgcggcatcgtgtttcaagtcaagcggaagatacttccagcagctttgacaacctgtttattgacaggttacagaggatcaccattgcggaccaaggtgaacaacagtcagaagaaaacgcaagtactaagaacttgacaggcctttccagtgggactgagaagaaacctcattacatggaagtgctagaaatgcgagccaaaaacccagtgccccagctgcgtaaatttaaaaccaatgtgttaccttttcgacaaaatgattcatctagtcattgccagaagagtgggtctcctatttcctcagaagagcggcggcgcagggataagcagcatcttgatgacatcacagcagctcggcttctaccacttcaccatatgcccacgcagctgctctccatagaagaatccttggcacttcagaaacagcagaaacagaattatgaggaaagaccgttttacagccctcagtaccgcagttccatgaacttgctcagcttggcagccgcagctaaggacacccgtggtagtaaaagcgggaagatgggctccctggctcttcttaccaaactctga

SEQ ID NO: 368 - protein, 363 aa, Homo sapiens
MCSLPRGFEPQAPEDLAQRSLVELREMLKRQERLLRNEKFICKLPDKGKKIFDSFAKLKAAIAECEEVRRKSELFNPVSLDCKLRQKAIAEVDVGTDKAQNSDPILDTSSLVPGCSSVDNIKSSQTSQNQGLGRPTLEGDEETSEVEYTVNKGPASSNRDRVPPSSEASEHHPRHRVSSQAEDTSSSFDNLFIDRLQRITIADQGEQQSEENASTKNLTGLSSGTEKKPHYMEVLEMRAKNPVPQLRKFKTNVLPFRQNDSSSHCQKSGSPISSEERRRRDKQHLDDITAARLLPLHHMPTQLLSIEESLALQKQQKQNYEERPFYSPQYRSSMNLLSLAAAAKDTRGSKSGKMGSLALLTKL

SEQ ID NO: 369 - DNA, 1317 bp, Homo sapiens
atgctgcgctccacgtccacggtcaccctgctctcgggcggcgccgccaggacgcccggggcgcccagcaggagggcaaatgtttgcagactacggctgaccgtacctcctgagagtccagttcctgagcaatgtgaaaagaagattgagagaaaagagcagcttcttgacctgagcaatggagaacctaccaggaaacttcctcagggtgttgtttatggtgtggtgcgaagatcagatcaaaatcagcagaaagaaatggtggtgtatgggtggtccaccagtcagctgaaagaagagatgaactacatcaaagatgtgagagccactttggaaaaggtgagaaagcgaatgtatggagactatgatgagatgagacagaagattcgacagctcacccaggaactatcagtttcccatgctcagcaggagtatctggagaatcacatccaaacccagtcgtctgccctggatcgttttaatgccatgaactcagccttggcatcagattccattggcctgcaaaaaaccctcgtggatgtgactttggaaaacagcaacattaaggatcaaatcagaaatctgcagcagacgtatgaagcatccatggacaagctgagggaaaagcagaggcagttggaggtagcgcaagttgaaaaccagctgctaaaaatgaaggtggaatcgtcccaagaagccaatgctgaggtgatgcgagagatgaccaagaagctgtacagccagtatgaggagaagctgcaggaagaacagaggaagcacagtgctgagaaggaggctcttttggaagaaaccaatagttttctgaaagcgattgaagaagccaataaaaagatgcaagcagcagagatcagcctagaggagaaagaccagaggatcggggagctggacaggctgattgagcgcatggaaaaggaacgtcatcaactgcaacttcaactcctagaacatgaaacagaaatgtctggggagttaactgattctgacaaggaaaggtatcagcagttggaggaggcatcagccagcctccgtgagcggatcagacacctagatgacatggtgcattgccagcagaagaaagtcaagcagatggtcgaggagaataatgaactacaaagcaggttggactatttaacagaaacccaggccaagactgaagtggaaaccagagagataggagtgggctgtgatcttctacccagccaaacaggcaggactcgtgaaattgtgatgccttctaggaactacaccccatacacaagagtcctggagttaaccatgaagaaaactctgacttag

SEQ ID NO: 370 - protein, 438 aa, Homo sapiens
MLRSTSTVTLLSGGAARTPGAPSRRANVCRLRLTVPPESPVPEQCEKKIERKEQLLDLSNGEPTRKLPQGVVYGVVRRSDQNQQKEMVVYGWSTSQLKEEMNYIKDVRATLEKVRKRMYGDYDEMRQKIRQLTQELSVSHAQQEYLENHIQTQSSALDRFNAMNSALASDSIGLQKTLVDVTLENSNIKDQIRNLQQTYEASMDKLREKQRQLEVAQVENQLLKMKVESSQEANAEVMREMTKKLYSQYEEKLQEEQRKHSAEKEALLEETNSFLKAIEEANKKMQAAEISLEEKDQRIGELDRLIERMEKERHQLQLQLLEHETEMSGELTDSDKERYQQLEEASASLRERIRHLDDMVHCQQKKVKQMVEENNELQSRLDYLTETQAKTEVETREIGVGCDLLPSQTGRTREIVMPSRNYTPYTRVLELTMKKTLT

SEQ ID NO: 371 - DNA, 1338 bp, Homo sapiens
atgctgcgctccacgtccacggtcaccctgctctcgggcggcgccgccaggacgcccggggcgcccagcaggagggcaaatgtttgcagactacggctgaccgtacctcctgagagtccagttcctgagcaatgtgaaaagaagattgagagaaaagagcagcttcttgacctgagcaatggagaacctaccaggaaacttcctcagggtgttgtttatggtgtggtgcgaagatcagatcaaaatcagcagaaagaaatggtggtgtatgggtggtccaccagtcagctgaaagaagagatgaactacatcaaagatgtgagagccactttggaaaaggtgagaaagcgaatgtatggagactatgatgagatgagacagaagattcgacagctcacccaggaactatcagtttcccatgctcagcaggagtatctggagaatcacatccaaacccagtcgtctgccctggatcgttttaatgccatgaactcagccttggcatcagattccattggcctgcaaaaaaccctcgtggatgtgactttggaaaacagcaacattaaggatcaaatcagaaatctgcagcagacgtatgaagcatccatggacaagctgagggaaaagcagaggcagttggaggtagcgcaagttgaaaaccagctgctaaaaatgaaggtggaatcgtcccaagaagccaatgctgaggtgatgcgagagatgaccaagaagctgtacagccagtatgaggagaagctgcaggaagaacagaggaagcacagtgctgagaaggaggctcttttggaagaaaccaatagttttctgaaagcgattgaagaagccaataaaaagatgcaagcagcagagatcagcctagaggagaaagaccagaggatcggggagctggacaggctgattgagcgcatggaaaaggaacgtcatcaactgcaacttcaactcctagaacatgaaacagaaatgtctggggagttaactgattctgacaaggaaaggtatcagcagttggaggaggcatcagccagcctccgtgagcggatcagacacctagatgacatggtgcattgccagcagaagaaagtcaagcagatggtcgaggagattgaatcattaaagaaaaagttgcaacagaaacagctcttaatactgcagcttttagaaaagatatctttcttagaaggagagaataatgaactacaaagcaggttggactatttaacagaaacccaggccaagactgaagtggaaaccagagagataggagtgggctgtgatcttctacccaggagatgcaagcaaagctcgcagcgcaaaaattag

SEQ ID NO: 372 - protein, 445 aa, Homo sapiens
MLRSTSTVTLLSGGAARTPGAPSRRANVCRLRLTVPPESPVPEQCEKKIERKEQLLDLSNGEPTRKLPQGVVYGVVRRSDQNQQKEMVVYGWSTSQLKEEMNYIKDVRATLEKVRKRMYGDYDEMRQKIRQLTQELSVSHAQQEYLENHIQTQSSALDRFNAMNSALASDSIGLQKTLVDVTLENSNIKDQIRNLQQTYEASMDKLREKQRQLEVAQVENQLLKMKVESSQEANAEVMREMTKKLYSQYEEKLQEEQRKHSAEKEALLEETNSFLKAIEEANKKMQAAEISLEEKDQRIGELDRLIERMEKERHQLQLQLLEHETEMSGELTDSDKERYQQLEEASASLRERIRHLDDMVHCQQKKVKQMVEEIESLKKKLQQKQLLILQLLEKISFLEGENNELQSRLDYLTETQAKTEVETREIGVGCDLLPRRCKQSSQRKN

SEQ ID NO: 373 - DNA, 1653 bp, Homo sapiens
atgctgcgctccacgtccacggtcaccctgctctcgggcggcgccgccaggacgcccggggcgcccagcaggagggcaaatgtttgcagactacggctgaccgtacctcctgagagtccagttcctgagcaatgtgaaaagaagattgagagaaaagagcagcttcttgacctgagcaatggagaacctaccaggaaacttcctcagggtgttgtttatggtgtggtgcgaagatcagatcaaaatcagcagaaagaaatggtggtgtatgggtggtccaccagtcagctgaaagaagagatgaactacatcaaagatgtgagagccactttggaaaaggtgagaaagcgaatgtatggagactatgatgagatgagacagaagattcgacagctcacccaggaactatcagtttcccatgctcagcaggagtatctggagaatcacatccaaacccagtcgtctgccctggatcgttttaatgccatgaactcagccttggcatcagattccattggcctgcaaaaaaccctcgtggatgtgactttggaaaacagcaacattaaggatcaaatcagaaatctgcagcagacgtatgaagcatccatggacaagctgagggaaaagcagaggcagttggaggtagcgcaagttgaaaaccagctgctaaaaatgaaggtggaatcgtcccaagaagccaatgctgaggtgatgcgagagatgaccaagaagctgtacagccagtatgaggagaagctgcaggaagaacagaggaagcacagtgctgagaaggaggctcttttggaagaaaccaatagttttctgaaagcgattgaagaagccaataaaaagatgcaagcagcagagatcagcctagaggagaaagaccagaggatcggggagctggacaggctgattgagcgcatggaaaaggaacgtcatcaactgcaacttcaactcctagaacatgaaacagaaatgtctggggagttaactgattctgacaaggaaaggtatcagcagttggaggaggcatcagccagcctccgtgagcggatcagacacctagatgacatggtgcattgccagcagaagaaagtcaagcagatggtcgaggagattgaatcattaaagaaaaagttgcaacagaaacagctcttaatactgcagcttttagaaaagatatctttcttagaaggagagaataatgaactacaaagcaggttggactatttaacagaaacccaggccaagactgaagtggaaaccagagagataggagtgggctgtgatcttctacccaggttaccttttcgacaaaatgattcatctagtcattgccagaagagtgggtctcctatttcctcagaagagcggcggcgcagggataagcagcatcttgatgacatcacagcagctcggcttctaccacttcaccatatgcccacgcagctgctctccatagaagaatccttggcacttcagaaacagcagaaacagaattatgaggagatgcaagcaaagctcgcagcgcaaaaattagctgaaagactgaatattaaaatgcggagttataatccagaaggggagtcttcagggagataccgagaagtaagggatgaagatgacgattggtcctctgatgaattctga

SEQ ID NO: 374 - protein, 550 aa, Homo sapiens
MLRSTSTVTLLSGGAARTPGAPSRRANVCRLRLTVPPESPVPEQCEKKIERKEQLLDLSNGEPTRKLPQGVVYGVVRRSDQNQQKEMVVYGWSTSQLKEEMNYIKDVRATLEKVRKRMYGDYDEMRQKIRQLTQELSVSHAQQEYLENHIQTQSSALDRFNAMNSALASDSIGLQKTLVDVTLENSNIKDQIRNLQQTYEASMDKLREKQRQLEVAQVENQLLKMKVESSQEANAEVMREMTKKLYSQYEEKLQEEQRKHSAEKEALLEETNSFLKAIEEANKKMQAAEISLEEKDQRIGELDRLIERMEKERHQLQLQLLEHETEMSGELTDSDKERYQQLEEASASLRERIRHLDDMVHCQQKKVKQMVEEIESLKKKLQQKQLLILQLLEKISFLEGENNELQSRLDYLTETQAKTEVETREIGVGCDLLPRLPFRQNDSSSHCQKSGSPISSEERRRRDKQHLDDITAARLLPLHHMPTQLLSIEESLALQKQQKQNYEEMQAKLAAQKLAERLNIKMRSYNPEGESSGRYREVRDEDDDWSSDEF

SEQ ID NO: 375 - DNA, 1308 bp, Homo sapiens
atgctgcgctccacgtccacggtcaccctgctctcgggcggcgccgccaggacgcccggggcgcccagcaggagggcaaatgtttgcagactacggctgaccgtacctcctgagagtccagttcctgagcaatgtgaaaagaagattgagagaaaagagcagcttcttgacctgagcaatggagaacctaccaggaaacttcctcagggtgttgtttatggtgtggtgcgaagatcagatcaaaatcagcagaaagaaatggtggtgtatgggtggtccaccagtcagctgaaagaagagatgaactacatcaaagatgtttcccatgctcagcaggagtatctggagaatcacatccaaacccagtcgtctgccctggatcgttttaatgccatgaactcagccttggcatcagattccattggcctgcaaaaaaccctcgtggatgtgactttggaaaacagcaacattaaggatcaaatcagaaatctgcagcagacgtatgaagcatccatggacaagctgagggaaaagcagaggcagttggaggtagcgcaagttgaaaaccagctgctaaaaatgaaggtggaatcgtcccaagaagccaatgctgaggtgatgcgagagatgaccaagaagctgtacagccagtatgaggagaagctgcaggaagaacagaggaagcacagtgctgagaaggaggctcttttggaagaaaccaatagttttctgaaagcgattgaagaagccaataaaaagatgcaagcagcagagatcagcctagaggagaaagaccagaggatcggggagctggacaggctgattgagcgcatggaaaaggaacgtcatcaactgcaacttcaactcctagaacatgaaacagaaatgtctggggagttaactgattctgacaaggaaaggtatcagcagttggaggaggcatcagccagcctccgtgagcggatcagacacctagatgacatggtgcattgccagcagaagaaagtcaagcagatggtcgaggagattgaatcattaaagaaaaagttgcaacagaaacagctcttaatactgcagcttttagaaaagatatctttcttagaaggagagaataatgaactacaaagcaggttggactatttaacagaaacccaggccaagactgaagtggaaaccagagagataggagtgggctgtgatcttctacccagccaaacaggcaggactcgtgaaattgtgatgccttctaggaactacaccccatacacaagagtcctggagttaaccatgaagaaaactctgacttag

SEQ ID NO: 376 - protein, 435 aa, Homo sapiens
MLRSTSTVTLLSGGAARTPGAPSRRANVCRLRLTVPPESPVPEQCEKKIERKEQLLDLSNGEPTRKLPQGVVYGVVRRSDQNQQKEMVVYGWSTSQLKEEMNYIKDVSHAQQEYLENHIQTQSSALDRFNAMNSALASDSIGLQKTLVDVTLENSNIKDQIRNLQQTYEASMDKLREKQRQLEVAQVENQLLKMKVESSQEANAEVMREMTKKLYSQYEEKLQEEQRKHSAEKEALLEETNSFLKAIEEANKKMQAAEISLEEKDQRIGELDRLIERMEKERHQLQLQLLEHETEMSGELTDSDKERYQQLEEASASLRERIRHLDDMVHCQQKKVKQMVEEIESLKKKLQQKQLLILQLLEKISFLEGENNELQSRLDYLTETQAKTEVETREIGVGCDLLPSQTGRTREIVMPSRNYTPYTRVLELTMKKTLT

SEQ ID NO: 377 - DNA, 1173 bp, Homo sapiens
atgctgcgctccacgtccacggtcaccctgctctcgggcggcgccgccaggacgcccggggcgcccagcaggagggcaaatgtttgcagactacggctgaccgtacctcctgagagtccagttcctgagcaatgtgaaaagaagattgagagaaaagagcagcttcttgacctgagcaatggagaacctaccaggaaacttcctcagggtgttgtttatggtgtggtgcgaagatcagatcaaaatcagcagaaagaaatggtggtgtatgggtggtccaccagtcagctgaaagaagagatgaactacatcaaagatgtgagagccactttggaaaaggtgagaaagcgaatgtatggagactatgatgagatgagacagaagattcgacagctcacccaggaactatcagtttcccatgctcagcaggagtatctggagaatcacatccaaacccagtcgtctgccctggatcgttttaatgccatgaactcagccttggcatcagattccattggcctgcaaaaaaccctcgtggatgtgactttggaaaacagcaacattaaggatcaaatcagaaatctgcagcagacgtatgaagcatccatggacaagctgagggaaaagcagaggcagttggaggtagcgcaagttgaaaaccagctgctaaaaatgaaggtggaatcgtcccaagaagccaatgctgaggtgatgcgagagatgaccaagaagctgtacagccagtatgaggagaagctgcaggaagaacagaggaagcacagtgctgagaaggaggctcttttggaagaaaccaatagttttctgaaagcgattgaagaagccaataaaaagatgcaagcagcagagatcagcctagaggagaaagaccagaggatcggggagctggacaggctgattgagcgcatggaaaaggaacgtcatcaactgcaacttcaactcctagaacatgaaacagaaatgtctggggagttaactgattctgacaaggaaaggtatcagcagttggaggaggcatcagccagcctccgtgagcggatcagacacctagatgacatggtgcattgccagcagaagaaagtcaagcagatggtcgaggagatcatgtcgcacgagctcttctccagatttagtctccggctctttggaagatga

SEQ ID NO: 378 - protein, 390 aa, Homo sapiens
MLRSTSTVTLLSGGAARTPGAPSRRANVCRLRLTVPPESPVPEQCEKKIERKEQLLDLSNGEPTRKLPQGVVYGVVRRSDQNQQKEMVVYGWSTSQLKEEMNYIKDVRATLEKVRKRMYGDYDEMRQKIRQLTQELSVSHAQQEYLENHIQTQSSALDRFNAMNSALASDSIGLQKTLVDVTLENSNIKDQIRNLQQTYEASMDKLREKQRQLEVAQVENQLLKMKVESSQEANAEVMREMTKKLYSQYEEKLQEEQRKHSAEKEALLEETNSFLKAIEEANKKMQAAEISLEEKDQRIGELDRLIERMEKERHQLQLQLLEHETEMSGELTDSDKERYQQLEEASASLRERIRHLDDMVHCQQKKVKQMVEEIMSHELFSRFSLRLFGR

SEQ ID NO: 379 - DNA, 1401 bp, Homo sapiens
atggaatatgagagttattattttgtaaaatttcagaaataccccaaaattgtcaaaaagtcatcagacacagcagaaaataatttaccgcaaagaagtagagggaagaccagaaggatgatgaacgacagttgtcaaaatcttcccaagatcaatcagcagaggccccggtccaaaaccacagcggggaagacaggggacaccaaatcgctcaataaggagcatcctaatcaggaggtagttgataacactcgcctggaaagtgccaacttcggcctacatatatcaagaatccgtaaagacagtggagaggaaaatgcccacccacgaagaggccaaatcattgacttccaagggctgctcacagatgccatcaagggagcaaccagtgaacttgccttgaacaccttcgaccataatccagacccctcagaacgactgctgaaacctctgagtgcatttattggcatgaacagtgagatgcgagaattggcagccgtggtgagccgggacatttatctccataatccaaacataaagtggaatgacattattggacttgatgcagccaagcagttagtcaaagaagctgttgtgtatcctataaggtatccacagctatttacaggaattctttctccctggaaaggactactgctgtacggccctccaggtacaggaaagactttactggccaaagctgtggccactgaatgtaaaacaaccttctttaacatttctgcatccaccattgtcagcaaatggagaggggattcagaaaaactcgttcgggtgttatttgagcttgcccgctaccacgccccatccacgatcttcctggacgagctggagtcggtgatgagtcagagaggcacagcttctgggggagaacatgaaggaagcctgcggatgaagacagagttactggtgcagatggatgggctggcacgctcagaagatctcgtatttgtcttagcagcttctaacctgccgtgggagctggactgtgccatgttacgccgcctggagaagaggattctggtcgatctccccagccgggaggccaggcaggccatgatctaccactggctgcctcctgtgagcaagagcagggccttggagctgcacacagagctggagtacagtgtgctgagccaggagactgagggctactcaggctcagatattaagctcgtctgcagggaagcagccatgcggcccgtgaggaagatctttgatgcacttgaaaatcaccagtcagaaagcagcgacttacccaggatccagttggatatagtaaccactgccgactttctggatgtgctaactcacaccaagccctccgcaaagaatctggctcagagatactcagactggcaaagagagttcgagtctgtctga

SEQ ID NO: 380 - protein, 466 aa, Homo sapiens
MEYESYYFVKFQKYPKIVKKSSDTAENNLPQRSRGKTRRMMNDSCQNLPKINQQRPRSKTTAGKTGDTKSLNKEHPNQEVVDNTRLESANFGLHISRIRKDSGEENAHPRRGQIIDFQGLLTDAIKGATSELALNTFDHNPDPSERLLKPLSAFIGMNSEMRELAAVVSRDIYLHNPNIKWNDIIGLDAAKQLVKEAVVYPIRYPQLFTGILSPWKGLLLYGPPGTGKTLLAKAVATECKTTFFNISASTIVSKWRGDSEKLVRVLFELARYHAPSTIFLDELESVMSQRGTASGGEHEGSLRMKTELLVQMDGLARSEDLVFVLAASNLPWELDCAMLRRLEKRILVDLPSREARQAMIYHWLPPVSKSRALELHTELEYSVLSQETEGYSGSDIKLVCREAAMRPVRKIFDALENHQSESSDLPRIQLDIVTTADFLDVLTHTKPSAKNLAQRYSDWQREFESV

SEQ ID NO: 381 - DNA, 1566 bp, Homo sapiens
tgcgagatgaggacagaagcacgacgaaaaaatcttctcattttgatttcgcattatttaacacaagaagggtatatcgatacagcaaatgctttggagcaagaaactaaactggggttacgacggtttgaagtttgtgacaacattgatcttgaaactattttgatggaatatgagagttattattttgtaaaatttcagaaataccccaaaattgtcaaaaagtcatcagacacagcagaaaataatttaccgcaaagaagtagagggaagaccagaaggatgatgaacgacagttgtcaaaatcttcccaagatcaatcagcagaggccccggtccaaaaccacagcggggaagacaggggacaccaaatcgctcaataaggagcatcctaatcaggaggtagttgataacactcgcctggaaagtgccaacttcggcctacatatatcaagaatccgtaaagacagtggagaggaaaatgcccacccacgaagaggccaaatcattgacttccaagggctgctcacagatgccatcaagggagcaaccagtgaacttgccttgaacaccttcgaccataatccagacccctcagaacgactgctgaaacctctgagtgcatttattggcatgaacagtgagatgcgagaattggcagccgtggtgagccgggacatttatctccataatccaaacataaagtggaatgacattattggacttgatgcagccaagcagttagtcaaagaagctgttgtgtatcctataaggtatccacagctatttacaggaattctttctccctggaaaggactactgctgtacggccctccaggtacaggaaagactttactggccaaagctgtggccactgaatgtaaaacaaccttctttaacatttctgcatccaccattgtcagcaaatggagaggggattcagaaaaactcgttcgggtgttatttgagcttgcccgctaccacgccccatccacgatcttcctggacgagctggagtcggtgatgagtcagagaggcacagcttctgggggagaacatgaaggaagcctgcggatgaagacagagttactggtgcagatggatgggctggcacgctcagaagatctcgtatttgtcttagcagcttctaacctgccgtgggagctggactgtgccatgttacgccgcctggagaagaggattctggtcgatctccccagccgggaggccaggcaggccatgatctaccactggctgcctcctgtgagcaagagcagggccttggagctgcacacagagctggagtacagtgtgctgagccaggagactgagggctactcaggctcagatattaagctcgtctgcagggaagcagccatgcggcccgtgaggaagatctttgatgcacttgaaaatcaccagtcagaaagcagcgacttacccaggatccagttggatatagtaaccactgccgactttctggatgtgctaactcacaccaagccctccgcaaagaatctggctcagagatactcagactggcaaagagagttcgagtctgtctga

SEQ ID NO: 382 - protein, 521 aa, Homo sapiens
CEMRTEARRKNLLILISHYLTQEGYIDTANALEQETKLGLRRFEVCDNIDLETILMEYESYYFVKFQKYPKIVKKSSDTAENNLPQRSRGKTRRMMNDSCQNLPKINQQRPRSKTTAGKTGDTKSLNKEHPNQEVVDNTRLESANFGLHISRIRKDSGEENAHPRRGQIIDFQGLLTDAIKGATSELALNTFDHNPDPSERLLKPLSAFIGMNSEMRELAAVVSRDIYLHNPNIKWNDIIGLDAAKQLVKEAVVYPIRYPQLFTGILSPWKGLLLYGPPGTGKTLLAKAVATECKTTFFNISASTIVSKWRGDSEKLVRVLFELARYHAPSTIFLDELESVMSQRGTASGGEHEGSLRMKTELLVQMDGLARSEDLVFVLAASNLPWELDCAMLRRLEKRILVDLPSREARQAMIYHWLPPVSKSRALELHTELEYSVLSQETEGYSGSDIKLVCREAAMRPVRKIFDALENHQSESSDLPRIQLDIVTTADFLDVLTHTKPSAKNLAQRYSDWQREFESV

SEQ ID NO: 383 - DNA, 552 bp, Homo sapiens; identical to SEQ ID NO: 195

SEQ ID NO: 384 - protein, 183 aa, Homo sapiens; identical to SEQ ID NO: 196

SEQ ID NO: 385 - DNA, 822 bp, Homo sapiens; identical to SEQ ID NO: 197

SEQ ID NO: 386 - protein, 273 aa, Homo sapiens; identical to SEQ ID NO: 198

SEQ ID NO: 387 - DNA, 1401 bp, Homo sapiens; identical to SEQ ID NO: 379

SEQ ID NO: 388 - protein, 466 aa, Homo sapiens; identical to SEQ ID NO: 380

SEQ ID NO: 389 - DNA, 1566 bp, Homo sapiens; identical to SEQ ID NO: 381

SEQ ID NO: 390 - protein, 521 aa, Homo sapiens; identical to SEQ ID NO: 382

SEQ ID NO: 391 - DNA, 1401 bp, Homo sapiens; identical to SEQ ID NO: 363

SEQ ID NO: 392 - protein, 466 aa, Homo sapiens; identical to SEQ ID NO: 364

SEQ ID NO: 393 - DNA, 1248 bp, Homo sapiens; identical to SEQ ID NO: 365

SEQ ID NO: 394 - protein, 415 aa, Homo sapiens; identical to SEQ ID NO: 366

SEQ ID NO: 395 - DNA, 1092 bp, Homo sapiens; identical to SEQ ID NO: 367

SEQ ID NO: 396 - protein, 363 aa, Homo sapiens; identical to SEQ ID NO: 368

SEQ ID NO: 397 - DNA, 1317 bp, Homo sapiens; identical to SEQ ID NO: 369

SEQ ID NO: 398 - protein, 438 aa, Homo sapiens; identical to SEQ ID NO: 370

SEQ ID NO: 399 - DNA, 1338 bp, Homo sapiens; identical to SEQ ID NO: 371

SEQ ID NO: 400 - protein, 1338 aa, Homo sapiens
ATGCTGCGCTCCACGTCCACGGTCACCCTGCTCTCGGGCGGCGCCGCCAGGACGCCCGGGGCGCCCAGCAGGAGGGCAAATGTTTGCAGACTACGGCTGACCGTACCTCCTGAGAGTCCAGTTCCTGAGCAATGTGAAAAGAAGATTGAGAGAAAAGAGCAGCTTCTTGACCTGAGCAATGGAGAACCTACCAGGAAACTTCCTCAGGGTGTTGTTTATGGTGTGGTGCGAAGATCAGATCAAAATCAGCAGAAAGAAATGGTGGTGTATGGGTGGTCCACCAGTCAGCTGAAAGAAGAGATGAACTACATCAAAGATGTGAGAGCCACTTTGGAAAAGGTGAGAAAGCGAATGTATGGAGACTATGATGAGATGAGACAGAAGATTCGACAGCTCACCCAGGAACTATCAGTTTCCCATGCTCAGCAGGAGTATCTGGAGAATCACATCCAAACCCAGTCGTCTGCCCTGGATCGTTTTAATGCCATGAACTCAGCCTTGGCATCAGATTCCATTGGCCTGCAAAAAACCCTCGTGGATGTGACTTTGGAAAACAGCAACATTAAGGATCAAATCAGAAATCTGCAGCAGACGTATGAAGCATCCATGGACAAGCTGAGGGAAAAGCAGAGGCAGTTGGAGGTAGCGCAAGTTGAAAACCAGCTGCTAAAAATGAAGGTGGAATCGTCCCAAGAAGCCAATGCTGAGGTGATGCGAGAGATGACCAAGAAGCTGTACAGCCAGTATGAGGAGAAGCTGCAGGAAGAACAGAGGAAGCACAGTGCTGAGAAGGAGGCTCTTTTGGAAGAAACCAATAGTTTTCTGAAAGCGATTGAAGAAGCCAATAAAAAGATGCAAGCAGCAGAGATCAGCCTAGAGGAGAAAGACCAGAGGATCGGGGAGCTGGACAGGCTGATTGAGCGCATGGAAAAGGAACGTCATCAACTGCAACTTCAACTCCTAGAACATGAAACAGAAATGTCTGGGGAGTTAACTGATTCTGACAAGGAAAGGTATCAGCAGTTGGAGGAGGCATCAGCCAGCCTCCGTGAGCGGATCAGACACCTAGATGACATGGTGCATTGCCAGCAGAAGAAAGTCAAGCAGATGGTCGAGGAGATTGAATCATTAAAGAAAAAGTTGCAACAGAAACAGCTCTTAATACTGCAGCTTTTAGAAAAGATATCTTTCTTAGAAGGAGAGAATAATGAACTACAAAGCAGGTTGGACTATTTAACAGAAACCCAGGCCAAGACTGAAGTGGAAACCAGAGAGATAGGAGTGGGCTGTGATCTTCTACCCAGGAGATGCAAGCAAAGCTCGCAGCGCAAAAATTAG

SEQ ID NO: 401 - DNA, 1653 bp, Homo sapiens; identical to SEQ ID NO: 373

SEQ ID NO: 402 - protein, 550 aa, Homo sapiens; identical to SEQ ID NO: 374

SEQ ID NO: 403 - DNA, 1308 bp, Homo sapiens; identical to SEQ ID NO: 375

SEQ ID NO: 404 - protein, 435 aa, Homo sapiens; identical to SEQ ID NO: 376

SEQ ID NO: 405 - DNA, 1173 bp, Homo sapiens; identical to SEQ ID NO: 377

SEQ ID NO: 406 - protein, 390 aa, Homo sapiens; identical to SEQ ID NO: 378

SEQ ID NO: 407 - DNA, 2076 bp, Homo sapiens; identical to SEQ ID NO: 95

SEQ ID NO: 408 - protein, 691 aa, Homo sapiens; identical to SEQ ID NO: 96

SEQ ID NO: 409 - DNA, 2076 bp, Homo sapiens; identical to SEQ ID NO: 95

SEQ ID NO: 410 - protein, 691 aa, Homo sapiens; identical to SEQ ID NO: 96

SEQ ID NO: 411 - DNA, 8307 bp, Homo sapiens; identical to SEQ ID NO: 149

SEQ ID NO: 412 - protein, 2768 aa, Homo sapiens; identical to SEQ ID NO: 150

SEQ ID NO: 413 - DNA, 8136 bp, Homo sapiens; identical to SEQ ID NO: 151

SEQ ID NO: 414 - protein, 2711 aa, Homo sapiens; identical to SEQ ID NO: 152

SEQ ID NO: 415 - DNA, 1110 bp, Homo sapiens; identical to SEQ ID NO: 65

SEQ ID NO: 416 - protein, 369 aa, Homo sapiens; identical to SEQ ID NO: 66

SEQ ID NO: 417 - DNA, 1032 bp, Homo sapiens; identical to SEQ ID NO: 67

SEQ ID NO: 418 - protein, 343 aa, Homo sapiens; identical to SEQ ID NO: 68

SEQ ID NO: 419 - DNA, 1110 bp, Homo sapiens; identical to SEQ ID NO: 65

SEQ ID NO: 420 - protein, 369 aa, Homo sapiens; identical to SEQ ID NO: 66

SEQ ID NO: 421 - DNA, 5097 bp, Homo sapiens
atggtgggagaactccgctacagggaattcagggtgcccctggggcccggcttacatgcctatcctgatgagctgatccgccagcgcgtgggccatgatgggcatcctgagtaccagatccgttggctcatcctgcggcgtggcgatgagggggacgggggctctggccaagtggactgcaaggctgagcacatcctgctgtggatgtccaaggatgagatctatgccaactgccacaagatgctgggcgaggatggccaggtcatcgggccctcccaggagtctgcaggggaggttggggccctggacaaatctgtgctggaggagatggaaaccgacgtgaagtccctcattcagagagcccttcggcagctggaggagtgtgtgggcactatccctcctgctcctctacttcacactgtccacgtgctcagcgcctatgccagcattgagcccctcactggagtattcaaggacccaagggtcctggacttgctcatgcacatgttgagtagtcctgattatcagattcgctggagtgcaggccggatgatacaagccctgtcctcccatgacgctgggacccggactcagatccttctgtcactgagccaacaagaagccattgagaaacacctggattttgacagccgctgtgctctgctagcactgtttgcacaggccacgctctctgaacaccccatgtctttcgagggcattcagctaccacaggtcccaggaagggtgctcttctccctggtgaagcggtatttgcatgtcacctcgctcctggatcagctgaacgacagtgctgcggagccaggagcccagaacacctctgctcctgaggagttgagtggggagaggggtcaactggagctggagttcagtatggccatgggcaccctgatctcggagctggtgcaagccatgcgctgggaccaggcctcagacagaccaaggagctcagcacggtcccccggttccatcttccagcctcagctggcagatgtgagcccagggctccccgctgcccaggctcagccctccttcaggaggtcaagacgttttcgccctcgttctgagttcgcaagtggcaatacctatgctttgtatgtgcgggacacactgcagccggggatgcgagtgcggatgctggatgattatgaggagatcagtgccggggatgagggcgagtttcggcagagcaacaacggtgtgcctcctgtgcaggtattttgggagtcaacaggccgcacctattgggtgcactggcacatgctggagatcttgggctttgaggaagacattgaggacatggttgaggctgatgagtaccaaggggcagtggccagtagagtcctgggtagagccctgcctgcctggcgctggaggcccatgacagaactctatgctgtgccttatgtgctgcctgaggatgaggacactgaggagtgtgaacacctgaccctggctgagtggtgggaactcctcttcttcatcaagaagctggatggacctgaccatcaggaggttctccagatcctccaggagaacctagatggggagattctggatgatgagatcctagctgaactggccgtgcccatagaattggcccaggacttgctgctgactctgccacagcgactcaatgacagtgccctcagggacctgatcaactgccatgtctacaagaagtatgggcctgaagccctagcagggaaccaagcctacccatcccttctagaagcccaagaagatgtcctcctgctagacgcgcaggcccaggctaaggactcagaagatgcagccaaagtggaagcaaaagaacccccatctcagagtcccaacactcccctgcagcgtctggtggagggttatggtccagctgggaaaatcctcctggatctagagcaagccctcagctcagaggggacccaggagaacaaggtcaagccactcctgctgcagctgcagcggcagccgcagcccttcctggcactgatgcagagcctggacactccggagactaacaggaccctgcacctgactgtgctgagaatcctgaagcagctggtggacttccccgaggcactgctgctcccctggcacgaggccgtggatgcctgcatggcctgcctgcggtccccaaacactgatcgagaggtgctccaggaactgattttcttcctgcaccgcctgacctcagtgagcagggactatgccgtggtgctgaatcagctgggagcaagagacgctatctccaaggccctggaaaagcacctgggaaagctggagctggctcaggagctgcgggacatggtgttcaagtgtgagaagcatgcccacctctaccgcaaactcatcaccaacatcctgggaggctgcatccagatggtgctgggccagatcgaagaccacagacgaacccaccaacccatcaacatccctttctttgatgtgttcctcagatacctgtgccagggctccagtgtggaagtgaaggaggacaagtgctgggagaaggtggaggtgtcctccaacccgcaccgggccagcaagctgacggaccacaaccccaagacctattgggagtccaacggcagcgccggctcccactacatcaccctgcacatgcgccggggcatcctcatcaggcaactgactctgcttgtggctagtgaggactcgagttacatgccggcccgagtggtggtgtgcgggggtgatagcactagctctcttcacacggaactcaactcggtgaatgtgatgccctctgccagccgggtgatcctcctggagaacctgacccgcttctggcccatcatccagatccgcataaagcgctgccagcagggtggcattgatacgcgcattcgggggttagagatcctaggccccaagcccacgttctggccagtgttccgggagcagctctgtcgtcacacacgcctcttctacatggttcgggcacaggcctggagccaggacatggcagaggaccgcaggagcctcctgcacctgagttctagactcaacggtgctctgcgccaggagcagaattttgctgaccgcttcctccctgatgacgaggctgcccaagctctgggcaagacctgctgggaggccctggtcagccccgtggtgcagaacatcacctcccctgatgaggatggcattagccccctgggttggctgctggaccagtacctggagtgtcaggaagctgtcttcaacccccagagccgcggcccagctttcttctcgcgggtgcgccgtctcactcacctgctggtgcatgtcgagccctgtgaggcaccccctcctgtggtggccactcctcggcccaaaggcagaaacagaagccacgactggagctccttggctacccggggccttccaagcagcatcatgagaaacctgacgcgctgttggcgggccgtggtggagaagcaggtgaacaattttctgacctcatcctggcgggatgatgactttgtgccacgctactgtgagcactttaatattctgcagaactcaagctctgaactgtttgggcctcgggcagccttcttgctggcgctgcaaaatggctgtgcgggagccttgctgaagctcccttttctcaaagctgcccacgtgagtgagcagttcgcccggcacattgaccagcagatccagggcagccggatcggtggagcccaggaaatggagaggctggcacagctgcagcaatgcctgcaagctgtcctgattttctccggcttggagatagccaccacttttgagcattattaccagcactacatggcggaccgtctcctgggcgtggtctcgagctggctggagggggccgtgctggagcagatcggtccctgcttccccaaccgcctcccccagcagatgttgcagagcctgagcacctctaaggagctgcagcgccagttccacgtctaccagctccagcagctggatcaggaactcctgaagctggaggatacagagaagaaaatacaggtgggccttggggccagtggcaaggagcacaagagcgagaaggaagaggaagctggggcagcagcagtggtggatgtggcggagggagaggaggaagaggaggagaatgaggacctctactatgaaggggcaatgccagaagtgtctgtgcttgtcctgtcccgacactcctggcctgttgcctcaatctgccacacactgaaccccagaacctgcctgccctcctacctgaggggcactttgaacagatactccaacttctacaacaagagtcagagccaccctgcccttgagcgaggctcacagaggcgactgcagtggacgtggctgggctgggctgagctgcagtttgggaaccagaccctgcatgtgtccaccgtgcagatgtggctactgctgtatctcaacgacctgaaggcggtctctgtggagagtctgctggcgttctcagggctctccgcagacatgctcaatcaggcgattgggcccctcacctcttcaagaggccccctggaccttcacgagcaaaaggatataccaggaggggtcctcaagattcgagatggcagcaaggaacccaggtcgagatgggacattgtgcggctcatcccacctcagacgtacctgcaagctgagggtgaagacggccagaacttggagaagagacggaatcttctgaactgcctcatcgtccgaatcctcaaggcccatggagatgaggggctgcacattgaccagcttgtctgtctggtgctggaggcttggcagaagggcccgtgtcctcccaggggtttggtcagcagccttggtaaggggtctgcatgcagcagcactgacgtcctctcctgcatcctacacctcctgggcaagggcacgctgagacgccatgacgaccggccccaggtgctgtcctatgcagtccctgtgactgtcatggagcctcacactgagtccctgaacccaggctcctcaggccccaacccacccctcaccttccataccctacagattcgctcccggggtgtgccctatgcctcctgcactgccacccagagcttctctaccttccggtag

SEQ ID NO: 422 - protein, 1698 aa, Homo sapiens
MVGELRYREFRVPLGPGLHAYPDELIRQRVGHDGHPEYQIRWLILRRGDEGDGGSGQVDCKAEHILLWMSKDEIYANCHKMLGEDGQVIGPSQESAGEVGALDKSVLEEMETDVKSLIQRALRQLEECVGTIPPAPLLHTVHVLSAYASIEPLTGVFKDPRVLDLLMHMLSSPDYQIRWSAGRMIQALSSHDAGTRTQILLSLSQQEAIEKHLDFDSRCALLALFAQATLSEHPMSFEGIQLPQVPGRVLFSLVKRYLHVTSLLDQLNDSAAEPGAQNTSAPEELSGERGQLELEFSMAMGTLISELVQAMRWDQASDRPRSSARSPGSIFQPQLADVSPGLPAAQAQPSFRRSRRFRPRSEFASGNTYALYVRDTLQPGMRVRMLDDYEEISAGDEGEFRQSNNGVPPVQVFWESTGRTYWVHWHMLEILGFEEDIEDMVEADEYQGAVASRVLGRALPAWRWRPMTELYAVPYVLPEDEDTEECEHLTLAEWWELLFFIKKLDGPDHQEVLQILQENLDGEILDDEILAELAVPIELAQDLLLTLPQRLNDSALRDLINCHVYKKYGPEALAGNQAYPSLLEAQEDVLLLDAQAQAKDSEDAAKVEAKEPPSQSPNTPLQRLVEGYGPAGKILLDLEQALSSEGTQENKVKPLLLQLQRQPQPFLALMQSLDTPETNRTLHLTVLRILKQLVDFPEALLLPWHEAVDACMACLRSPNTDREVLQELIFFLHRLTSVSRDYAVVLNQLGARDAISKALEKHLGKLELAQELRDMVFKCEKHAHLYRKLITNILGGCIQMVLGQIEDHRRTHQPINIPFFDVFLRYLCQGSSVEVKEDKCWEKVEVSSNPHRASKLTDHNPKTYWESNGSAGSHYITLHMRRGILIRQLTLLVASEDSSYMPARVVVCGGDSTSSLHTELNSVNVMPSASRVILLENLTRFWPIIQIRIKRCQQGGIDTRIRGLEILGPKPTFWPVFREQLCRHTRLFYMVRAQAWSQDMAEDRRSLLHLSSRLNGALRQEQNFADRFLPDDEAAQALGKTCWEALVSPVVQNITSPDEDGISPLGWLLDQYLECQEAVFNPQSRGPAFFSRVRRLTHLLVHVEPCEAPPPVVATPRPKGRNRSHDWSSLATRGLPSSIMRNLTRCWRAVVEKQVNNFLTSSWRDDDFVPRYCEHFNILQNSSSELFGPRAAFLLALQNGCAGALLKLPFLKAAHVSEQFARHIDQQIQGSRIGGAQEMERLAQLQQCLQAVLIFSGLEIATTFEHYYQHYMADRLLGVVSSWLEGAVLEQIGPCFPNRLPQQMLQSLSTSKELQRQFHVYQLQQLDQELLKLEDTEKKIQVGLGASGKEHKSEKEEEAGAAAVVDVAEGEEEEEENEDLYYEGAMPEVSVLVLSRHSWPVASICHTLNPRTCLPSYLRGTLNRYSNFYNKSQSHPALERGSQRRLQWTWLGWAELQFGNQTLHVSTVQMWLLLYLNDLKAVSVESLLAFSGLSADMLNQAIGPLTSSRGPLDLHEQKDIPGGVLKIRDGSKEPRSRWDIVRLIPPQTYLQAEGEDGQNLEKRRNLLNCLIVRILKAHGDEGLHIDQLVCLVLEAWQKGPCPPRGLVSSLGKGSACSSTDVLSCILHLLGKGTLRRHDDRPQVLSYAVPVTVMEPHTESLNPGSSGPNPPLTFHTLQIRSRGVPYASCTATQSFSTFR

SEQ ID NO: 423 - DNA, 1044 bp, Homo sapiens; identical to SEQ ID NO: 31

SEQ ID NO: 424 - protein, 347 aa, Homo sapiens; identical to SEQ ID NO: 32

SEQ ID NO: 425 - DNA, 1503 bp, Homo sapiens; identical to SEQ ID NO: 33

SEQ ID NO: 426 - protein, 500 aa, Homo sapiens; identical to SEQ ID NO: 34

SEQ ID NO: 427 - DNA, 1401 bp, Homo sapiens; identical to SEQ ID NO: 35

SEQ ID NO: 428 - protein, 466 aa, Homo sapiens; identical to SEQ ID NO: 36

SEQ ID NO: 429 - DNA, 1299 bp, Homo sapiens; identical to SEQ ID NO: 37

SEQ ID NO: 430 - protein, 432 aa, Homo sapiens; identical to SEQ ID NO: 38

SEQ ID NO: 431 - DNA, 999 bp, Homo sapiens; identical to SEQ ID NO: 39

SEQ ID NO: 432 - protein, 333 aa, Homo sapiens; identical to SEQ ID NO: 40

SEQ ID NO: 433 - DNA, 1128 bp, Homo sapiens; identical to SEQ ID NO: 41

SEQ ID NO: 434 - protein, 375 aa, Homo sapiens; identical to SEQ ID NO: 42

SEQ ID NO: 435 - DNA, 2964 bp, Homo sapiens; identical to SEQ ID NO: 43

SEQ ID NO: 436 - protein, 643 aa, Homo sapiens; identical to SEQ ID NO: 44

SEQ ID NO: 437 - DNA, 3051 bp, Homo sapiens; identical to SEQ ID NO: 45

SEQ ID NO: 438 - protein, 677 aa, Homo sapiens; identical to SEQ ID NO: 46

SEQ ID NO: 439 - DNA, 1932 bp, Homo sapiens; identical to SEQ ID NO: 47

SEQ ID NO: 440 - protein, 633 aa, Homo sapiens; identical to SEQ ID NO: 48

SEQ ID NO: 441 - DNA, 1082 bp, Homo sapiens; identical to SEQ ID NO: 325

SEQ ID NO: 442 - protein, 140 aa, Homo sapiens; identical to SEQ ID NO: 326

SEQ ID NO: 443 - DNA, 721 bp, Homo sapiens; identical to SEQ ID NO: 327

SEQ ID NO: 444 - protein, 164 aa, Homo sapiens; identical to SEQ ID NO: 328

SEQ ID NO: 445 - DNA, 492 bp, Homo sapiens; identical to SEQ ID NO: 329

SEQ ID NO: 446 - protein, 163 aa, Homo sapiens; identical to SEQ ID NO: 330

SEQ ID NO: 447 - DNA, 1411 bp, Homo sapiens; identical to SEQ ID NO: 331

SEQ ID NO: 448 - protein, 180 aa, Homo sapiens; identical to SEQ ID NO: 332

SEQ ID NO: 449 - DNA, 288 bp, Homo sapiens; identical to SEQ ID NO: 333

SEQ ID NO: 450 - protein, 95 aa, Homo sapiens; identical to SEQ ID NO: 334

SEQ ID NO: 451 - DNA, 540 bp, Homo sapiens; identical to SEQ ID NO: 335

SEQ ID NO: 452 - protein, 179 aa, Homo sapiens; identical to SEQ ID NO: 336

SEQ ID NO: 453 - DNA, 3360 bp, Homo sapiens; identical to SEQ ID NO: 277

SEQ ID NO: 454 - protein, 1119 aa, Homo sapiens; identical to SEQ ID NO: 278

SEQ ID NO: 455 - DNA, 4029 bp, Homo sapiens; identical to SEQ ID NO: 279

SEQ ID NO: 456 - protein, 1342 aa, Homo sapiens; identical to SEQ ID NO: 280

SEQ ID NO: 457 - DNA, 3564 bp, Homo sapiens; identical to SEQ ID NO: 281

SEQ ID NO: 458 - protein, 1187 aa, Homo sapiens; identical to SEQ ID NO: 282

SEQ ID NO: 459 - DNA, 1731 bp, Homo sapiens
atgggctccattctcagccgccgcatcgcgggggtggaggacatcgacatccaggcgaactcggcctatcgctaccctccgaagtccggaaactactttgcttcgcactttttcatgggaggagagaaattcgacaccccccaccctgaaggttacctctttggagagaacatggatctgaacttcctgggcagccgcccggtccagtttccctacgtcactcctgccccccacgagcccgtgaagacgctgcggagcctggtgaacatccgcaaagactccctgcggctggtgaggtacaaagacgatgccgacagccccaccgaggacggcgacaagccccgggtgctctacagcctggagttcaccttcgacgccgatgcccgcgtggccatcaccatctactgccaggcatcggaggagttcctgaacggcagggcagtatacagccccaagagcccctcgctacagtccgagaccgtccactacaagagaggggtgagccagcagttctccctgccctccttcaagattgacttctcggaatggaaggatgacgagctgaactttgacctggaccggggcgtgtttccagtagtcatccaggctgtggtggacgaaggagatgtggtggaagtgactggccacgcccacgtgctcttggctgcctttgaaaagcacatggacggcagcttctctgtgaagcctttaaagcagaagcaaattgtggaccgggtcagctacctcctgcaggagatctatggcattgagaacaagaacaaccaggagaccaagccctcggacgacgagaacagcgacaacagcaacgagtgtgtggtgtgcctgtccgacctgcgggacacgctgatcctgccctgccgccacctgtgcctctgtacctcctgcgccgacacgctgcgctaccaggccaacaactgccccatctgccggctgcctttccgggccctcctgcagatccgggcggtgcggaagaagccaggagccctgtcccccgtgtccttcagccccgtcctggcccagagcctggagcatgatgagcactcttgtccctttaaaaaatcaaagccgcaccccgcctccctggccagcaagaaacctaaaagggaaacaaactctgacagcgtcccacctggctacgagcccatctcgctgctcgaggcgctcaacggcctccgggctgtctccccggccatcccctcggcccctctttatgaagaaatcacctattcaggcatctcggacggcctgtcccaggccagctgtcccctcgcggctatcgaccacatcctggacagcagccgccagaagggcaggccgcagagcaaggcccccgacagcaccctacggtccccgtcttcccccatccacgaagaggatgaggagaagctctccgaggacgtggacgcccctcccccactgggtggcgcagagctggccctgcgggaaagcagctcccctgagagtttcataacagaagaggttgatgagtcgtcgtcaccacagcaagggacccgagcagcttccattgagaatgtcctgcaggacagcagccccgagcactgtggccgaggcccacctgctgacatctacctgccaggacggcccacctccatggagacggcccacggcctcgccaccaccagccccacctggcctccacttggtggccccagccccgatcccagcgccgccgagctgaccccactctga

SEQ ID NO: 460 - protein, 576 aa, Homo sapiens
MGSILSRRIAGVEDIDIQANSAYRYPPKSGNYFASHFFMGGEKFDTPHPEGYLFGENMDLNFLGSRPVQFPYVTPAPHEPVKTLRSLVNIRKDSLRLVRYKDDADSPTEDGDKPRVLYSLEFTFDADARVAITIYCQASEEFLNGRAVYSPKSPSLQSETVHYKRGVSQQFSLPSFKIDFSEWKDDELNFDLDRGVFPVVIQAVVDEGDVVEVTGHAHVLLAAFEKHMDGSFSVKPLKQKQIVDRVSYLLQEIYGIENKNNQETKPSDDENSDNSNECVVCLSDLRDTLILPCRHLCLCTSCADTLRYQANNCPICRLPFRALLQIRAVRKKPGALSPVSFSPVLAQSLEHDEHSCPFKKSKPHPASLASKKPKRETNSDSVPPGYEPISLLEALNGLRAVSPAIPSAPLYEEITYSGISDGLSQASCPLAAIDHILDSSRQKGRPQSKAPDSTLRSPSSPIHEEDEEKLSEDVDAPPPLGGAELALRESSSPESFITEEVDESSSPQQGTRAASIENVLQDSSPEHCGRGPPADIYLPGRPTSMETAHGLATTSPTWPPLGGPSPDPSAAELTPL

SEQ ID NO: 461 - DNA, 1659 bp, Homo sapiens
atgggctccattctcagccgccgcatcgcgggggtggaggacatcgacatccaggcgaactcggcctatcgctaccctccgaagtccggaaactactttgcttcgcactttttcatgggaggagagaaattcgacaccccccaccctgaaggttacctctttggagagaacatggatctgaacttcctgggcagccgcccggtccagtttccctacgtcactcctgccccccacgagcccgtgaagacgctgcggagcctggtgaacatccgcaaagactccctgcggctggtgaggtacaaagacgatgccgacagccccaccgaggacggcgacaagccccgggtgctctacagcctggagttcaccttcgacgccgatgcccgcgtggccatcaccatctactgccaggcatcggaggagttcctgaacggcagggcagtatacagccccaagagcccctcgctacagtccgagaccgtccactacaagagaggggtgagccagcagttctccctgccctccttcaagattgacttctcggaatggaaggatgacgagctgaactttgacctggaccggggcgtgtttccagtagtcatccaggctgtggtggacgaaggagatgtggtggaagtgactggccacgcccacgtgctcttggctgcctttgaaaagcacatggacggcagcttctctgtgaagcctttaaagcagaagcaaattgtggaccgggtcagctacctcctgcaggagatctatggcattgagaacaagaacaaccaggagaccaagccctcggacgacgagaacagcgacaacagcaacgagtgtgtggtgtgcctgtccgacctgcgggacacgctgatcctgccctgccgccacctgtgcctctgtacctcctgcgccgacacgctgcgctaccaggccaacaactgccccatctgccggctgcctttccgggccctcctgcagatccgggcggtgcggaagaagccaggagccctgtcccccgtgtccttcagccccgtcctggcccagagcctggagcatgatgagcactcttgtccctttaaaaaatcaaagccgcaccccgcctccctggccagcaagaaacctaaaagggaaacaaactctgacagcgtcccacctggctacgagcccatctcgctgctcgaggcgctcaacggcctccgggctgtctccccggccatcccctcggcccctctttatgaagaaatcacctattcaggcatctcggacggcctgtcccaggccagctgtcccctcgcggctatcgaccacatcctggacagcagccgccagaagggcaggccgcagagcaaggcccccgacagcaccctacggtccccgtcttcccccatccacgaagaggatgaggagaagctctccgaggacgtggacgcccctcccccactgggtggcgcagagctggccctgcgggaaagcagctcccctgagagtttcataacagaagaggttgatgagtcgtcgtcaccacagcaagggacccgagcagcttccattgagaatgtcctgcaggacagcagccccgagcactgtggccgaggcccacctgctgacatctacctgccagccctggggcccgactcctgctctgttggtatagacgagtaa

SEQ ID NO: 462 - protein, 552 aa, Homo sapiens
MGSILSRRIAGVEDIDIQANSAYRYPPKSGNYFASHFFMGGEKFDTPHPEGYLFGENMDLNFLGSRPVQFPYVTPAPHEPVKTLRSLVNIRKDSLRLVRYKDDADSPTEDGDKPRVLYSLEFTFDADARVAITIYCQASEEFLNGRAVYSPKSPSLQSETVHYKRGVSQQFSLPSFKIDFSEWKDDELNFDLDRGVFPVVIQAVVDEGDVVEVTGHAHVLLAAFEKHMDGSFSVKPLKQKQIVDRVSYLLQEIYGIENKNNQETKPSDDENSDNSNECVVCLSDLRDTLILPCRHLCLCTSCADTLRYQANNCPICRLPFRALLQIRAVRKKPGALSPVSFSPVLAQSLEHDEHSCPFKKSKPHPASLASKKPKRETNSDSVPPGYEPISLLEALNGLRAVSPAIPSAPLYEEITYSGISDGLSQASCPLAAIDHILDSSRQKGRPQSKAPDSTLRSPSSPIHEEDEEKLSEDVDAPPPLGGAELALRESSSPESFITEEVDESSSPQQGTRAASIENVLQDSSPEHCGRGPPADIYLPALGPDSCSVGIDE

SEQ ID NO: 463 - DNA, 1596 bp, Homo sapiens
atgggctccattctcagccgccgcatcgcgggggtggaggacatcgacatccaggcgaactcggcctatcgctaccctccgaagtccggaaactactttgcttcgcactttttcatgggaggagagaaattcgacaccccccaccctgaaggttacctctttggagagaacatggatctgaacttcctgggcagccgcccggtccagtttccctacgtcactcctgccccccacgagcccgtgaagacgctgcggagcctggtgaacatccgcaaagactccctgcggctggtgaggtacaaagacgatgccgacagccccaccgaggacggcgacaagccccgggtgctctacagcctggagttcaccttcgacgccgatgcccgcgtggccatcaccatctactgccaggcatcggaggagttcctgaacggcagggcagtatacagccccaagagcccctcgctacagtccgagaccgtccactacaagagaggggtgagccagcagttctccctgccctccttcaagattgacttctcggaatggaaggatgacgagctgaactttgacctggaccggggcgtgtttccagtagtcatccaggctgtggtggacgaaggagatgcagtggtggaagtgactggccacgcccacgtgctcttggctgcctttgaaaagcacatggacggcagcttctctgtgaagcctttaaagcagaagcaaattgtggaccgggtcagctacctcctgcaggagatctatggcattgagaacaagaacaaccaggagaccaagccctcggacgacgagaacagcgacaacagcaacgagtgtgtggtgtgcctgtccgacctgcgggacacgctgatcctgccctgccgccacctgtgcctctgtacctcctgcgccgacacgctgcgctaccaggccaacaactgccccatctgccggctgcctttccgggccctcctgcagatccgggcggtgcggaagaagccaggagccctgtcccccgtgtccttcagccccgtcctggcccagagcctggagcatgatgagcactctaactctgacagcgtcccacctggctacgagcccatctcgctgctcgaggcgctcaacggcctccgggctgtctccccggccatcccctcggcccctctttatgaagaaatcacctattcaggcatctcggacggcctgtcccaggccagctgtcccctcgcggctatcgaccacatcctggacagcagccgccagaagggcaggccgcagagcaaggcccccgacagcaccctacggtccccgtcttcccccatccacgaagaggatgaggagaagctctccgaggacgtggacgcccctcccccactgggtggcgcagagctggccctgcgggaaagcagctcccctgagagtttcataacagaagaggttgatgagtcgtcgtcaccacagcaagggacccgagcagcttccattgagaatgtcctgcaggacagcagccccgagcactgtggccgaggcccacctgctgacatctacctgccagccctggggcccgactcctgctctgttggtatagacgagtaa

SEQ ID NO: 464 - protein, 531 aa, Homo sapiens
MGSILSRRIAGVEDIDIQANSAYRYPPKSGNYFASHFFMGGEKFDTPHPEGYLFGENMDLNFLGSRPVQFPYVTPAPHEPVKTLRSLVNIRKDSLRLVRYKDDADSPTEDGDKPRVLYSLEFTFDADARVAITIYCQASEEFLNGRAVYSPKSPSLQSETVHYKRGVSQQFSLPSFKIDFSEWKDDELNFDLDRGVFPVVIQAVVDEGDAVVEVTGHAHVLLAAFEKHMDGSFSVKPLKQKQIVDRVSYLLQEIYGIENKNNQETKPSDDENSDNSNECVVCLSDLRDTLILPCRHLCLCTSCADTLRYQANNCPICRLPFRALLQIRAVRKKPGALSPVSFSPVLAQSLEHDEHSNSDSVPPGYEPISLLEALNGLRAVSPAIPSAPLYEEITYSGISDGLSQASCPLAAIDHILDSSRQKGRPQSKAPDSTLRSPSSPIHEEDEEKLSEDVDAPPPLGGAELALRESSSPESFITEEVDESSSPQQGTRAASIENVLQDSSPEHCGRGPPADIYLPALGPDSCSVGIDE

SEQ ID NO: 465 - DNA, 2859 bp, Homo sapiens
atgggagtgaggcacccgccctgctcccaccggctcctggccgtctgcgccctcgtgtccttggcaaccgctgcactcctggggcacatcctactccatgatttcctgctggttccccgagagctgagtggctcctccccagtcctggaggagactcacccagctcaccagcagggagccagcagaccagggccccgggatgcccaggcacaccccggccgtcccagagcagtgcccacacagtgcgacgtcccccccaacagccgcttcgattgcgcccctgacaaggccatcacccaggaacagtgcgaggcccgcggctgttgctacatccctgcaaagcaggggctgcagggagcccagatggggcagccctggtgcttcttcccacccagctaccccagctacaagctggagaacctgagctcctctgaaatgggctacacggccaccctgacccgtaccacccccaccttcttccccaaggacatcctgaccctgcggctggacgtgatgatggagactgagaaccgcctccacttcacgatcaaagatccagctaacaggcgctacgaggtgcccttggagaccccgcatgtccacagccgggcaccgtccccactctacagcgtggagttctccgaggagcccttcggggtgatcgtgcgccggcagctggacggccgcgtgctgctgaacacgacggtggcgcccctgttctttgcggaccagttccttcagctgtccacctcgctgccctcgcagtatatcacaggcctcgccgagcacctcagtcccctgatgctcagcaccagctggaccaggatcaccctgtggaaccgggaccttgcgcccacgcccggtgcgaacctctacgggtctcaccctttctacctggcgctggaggacggcgggtcggcacacggggtgttcctgctaaacagcaatgccatggatgtggtcctgcagccgagccctgcccttagctggaggtcgacaggtgggatcctggatgtctacatcttcctgggcccagagcccaagagcgtggtgcagcagtacctggacgttgtgggatacccgttcatgccgccatactggggcctgggcttccacctgtgccgctggggctactcctccaccgctatcacccgccaggtggtggagaacatgaccagggcccacttccccctggacgtccagtggaacgacctggactacatggactcccggagggacttcacgttcaacaaggatggcttccgggacttcccggccatggtgcaggagctgcaccagggcggccggcgctacatgatgatcgtggatcctgccatcagcagctcgggccctgccgggagctacaggccctacgacgagggtctgcggaggggggttttcatcaccaacgagaccggccagccgctgattgggaaggtatggcccgggtccactgccttccccgacttcaccaaccccacagccctggcctggtgggaggacatggtggctgagttccatgaccaggtgcccttcgacggcatgtggattgacatgaacgagccttccaacttcatcaggggctctgaggacggctgccccaacaatgagctggagaacccaccctacgtgcctggggtggttggggggaccctccaggcggccaccatctgtgcctccagccaccagtttctctccacacactacaacctgcacaacctctacggcctgaccgaagccatcgcctcccacagggcgctggtgaaggctcgggggacacgcccatttgtgatctcccgctcgacctttgctggccacggccgatacgccggccactggacgggggacgtgtggagctcctgggagcagctcgcctcctccgtgccagaaatcctgcagtttaacctgctgggggtgcctctggtcggggccgacgtctgcggcttcctgggcaacacctcagaggagctgtgtgtgcgctggacccagctgggggccttctaccccttcatgcggaaccacaacagcctgctcagtctgccccaggagccgtacagcttcagcgagccggcccagcaggccatgaggaaggccctcaccctgcgctacgcactcctcccccacctctacacactgttccaccaggcccacgtcgcgggggagaccgtggcccggcccctcttcctggagttccccaaggactctagcacctggactgtggaccaccagctcctgtggggggaggccctgctcatcaccccagtgctccaggccgggaaggccgaagtgactggctacttccccttgggcacatggtacgacctgcagacggtgccagtagaggcccttggcagcctcccacccccacctgcagctccccgtgagccagccatccacagcgaggggcagtgggtgacgctgccggcccccctggacaccatcaacgtccacctccgggctgggtacatcatccccctgcagggccctggcctcacaaccacagagtcccgccagcagcccatggccctggctgtggccctgaccaagggtggggaggcccgaggggagctgttctgggacgatggagagagcctggaagtgctggagcgaggggcctacacacaggtcatcttcctggccaggaataacacgatcgtgaatgagctggtacgtgtgaccagtgagggagctggcctgcagctgcagaaggtgactgtcctgggcgtggccacggcgccccagcaggtcctctccaacggtgtccctgtctccaacttcacctacagccccgacaccaaggtcctggacatctgtgtctcgctgttgatgggagagcagtttctcgtcagctggtgttag

SEQ ID NO: 466 - protein, 952 aa, Homo sapiens
MGVRHPPCSHRLLAVCALVSLATAALLGHILLHDFLLVPRELSGSSPVLEETHPAHQQGASRPGPRDAQAHPGRPRAVPTQCDVPPNSRFDCAPDKAITQEQCEARGCCYIPAKQGLQGAQMGQPWCFFPPSYPSYKLENLSSSEMGYTATLTRTTPTFFPKDILTLRLDVMMETENRLHFTIKDPANRRYEVPLETPHVHSRAPSPLYSVEFSEEPFGVIVRRQLDGRVLLNTTVAPLFFADQFLQLSTSLPSQYITGLAEHLSPLMLSTSWTRITLWNRDLAPTPGANLYGSHPFYLALEDGGSAHGVFLLNSNAMDVVLQPSPALSWRSTGGILDVYIFLGPEPKSVVQQYLDVVGYPFMPPYWGLGFHLCRWGYSSTAITRQVVENMTRAHFPLDVQWNDLDYMDSRRDFTFNKDGFRDFPAMVQELHQGGRRYMMIVDPAISSSGPAGSYRPYDEGLRRGVFITNETGQPLIGKVWPGSTAFPDFTNPTALAWWEDMVAEFHDQVPFDGMWIDMNEPSNFIRGSEDGCPNNELENPPYVPGVVGGTLQAATICASSHQFLSTHYNLHNLYGLTEAIASHRALVKARGTRPFVISRSTFAGHGRYAGHWTGDVWSSWEQLASSVPEILQFNLLGVPLVGADVCGFLGNTSEELCVRWTQLGAFYPFMRNHNSLLSLPQEPYSFSEPAQQAMRKALTLRYALLPHLYTLFHQAHVAGETVARPLFLEFPKDSSTWTVDHQLLWGEALLITPVLQAGKAEVTGYFPLGTWYDLQTVPVEALGSLPPPPAAPREPAIHSEGQWVTLPAPLDTINVHLRAGYIIPLQGPGLTTTESRQQPMALAVALTKGGEARGELFWDDGESLEVLERGAYTQVIFLARNNTIVNELVRVTSEGAGLQLQKVTVLGVATAPQQVLSNGVPVSNFTYSPDTKVLDICVSLLMGEQFLVSWC

SEQ ID NO: 467 - DNA, 2859 bp, Homo sapiens; identical to SEQ ID NO: 465

SEQ ID NO: 468 - protein, 952 aa, Homo sapiens; identical to SEQ ID NO: 466

SEQ ID NO: 469 - DNA, 2859 bp, Homo sapiens; identical to SEQ ID NO: 465

SEQ ID NO: 470 - protein, 952 aa, Homo sapiens; identical to SEQ ID NO: 466

SEQ ID NO: 471 - DNA, 924 bp, Homo sapiens; identical to SEQ ID NO: 15

SEQ ID NO: 472 - protein, 307 aa, Homo sapiens; identical to SEQ ID NO: 16

SEQ ID NO: 473 - DNA, 1623 bp, Homo sapiens
atgagggtagctgcggcgactgcggcggctggagcggggccggccatggcggtgtggacgcgggccaccaaagcggggctggtggagctgctcctgagggagcgctgggtccgagtggtggccgagctgagcggggagagcctgagcctgacgggcgacgccgccgcggccgagctggagcccgctctgggacccgcggccgccgccttcaacggcctcccaaacggcggcggcgcgggcgactcgctgcccgggagcccaagccgcggcctggggcccccgagcccgccggcgccgcctcggggccccgcgggtgaggcgggcgcgtcgccgcccgtgcgccgggtgcgggtggtgaagcaagaggcgggcggcctgggcatcagcatcaagggcggccgcgagaaccggatgccgatcctcatctccaagatcttccccgggctggctgccgaccagagccgggcgctgcggctgggcgacgccatcctgtcggtgaacggcaccgacctgcgccaggccacccacgaccaggccgtgcaggcgctgaagcgcgcgggcaaggaggtgctgctggaggtcaagttcatccgagaagtaacaccatatatcaagaagccatcattagtatcagatctgccgtgggaaggtgcagccccccagtcaccaagctttagtggcagtgaggactctggttcgccaaaacaccagaacagcaccaaggacaggaagatcatccctctcaaaatgtgctttgctgctagaaacctaagcatgccggatctggaaaacagattgatagagctacattctcctgatagcaggaacacgttgatcctacgctgcaaagatacagccacagcacactcctggttcgtagctatccacaccaacataatggctctcctcccacaggtgttggctgaactcaacgccatgcttggggcaaccagtacagcaggaggcagtaaagaggtgaagcatattgcctggctggcagaacaggcaaaactagatggtggaagacagcaatggagacctgtcctcatggctgtgactgagaaggatttgctgctctatgactgtatgccgtggacaagagatgcctgggcgtcaccatgccacagctacccacttgttgccaccaggttggttcattctggctccggatgtcgatccccctcccttggatctgaccttacatttgctaccaggacaggctctcgacagggcattgagatgcatctcttcagggtggagacacatcgggatctgtcatcctggaccaggatacttgttcagggttgccatgctgctgctgagctgatcaaggaagtctctctaggctgcatgttaaatggccaagaggtgaggcttactattcactatgaaaatgggttcaccatctcaagggaaaatggaggctccagcagcatattgtaccgctacccctttgaaaggctgaagatgtctgctgatgatggcatccgaaatctatacttggattttggtggtcccgagggagaactgaccatggacctgcactcttgtccgaagccgattgtatttgtgttgcacacgtttttatcggccaaagtcactcgtatgggactgcttgtatga

SEQ ID NO: 474 - protein, 540 aa, Homo sapiens
MRVAAATAAAGAGPAMAVWTRATKAGLVELLLRERWVRVVAELSGESLSLTGDAAAAELEPALGPAAAAFNGLPNGGGAGDSLPGSPSRGLGPPSPPAPPRGPAGEAGASPPVRRVRVVKQEAGGLGISIKGGRENRMPILISKIFPGLAADQSRALRLGDAILSVNGTDLRQATHDQAVQALKRAGKEVLLEVKFIREVTPYIKKPSLVSDLPWEGAAPQSPSFSGSEDSGSPKHQNSTKDRKIIPLKMCFAARNLSMPDLENRLIELHSPDSRNTLILRCKDTATAHSWFVAIHTNIMALLPQVLAELNAMLGATSTAGGSKEVKHIAWLAEQAKLDGGRQQWRPVLMAVTEKDLLLYDCMPWTRDAWASPCHSYPLVATRLVHSGSGCRSPSLGSDLTFATRTGSRQGIEMHLFRVETHRDLSSWTRILVQGCHAAAELIKEVSLGCMLNGQEVRLTIHYENGFTISRENGGSSSILYRYPFERLKMSADDGIRNLYLDFGGPEGELTMDLHSCPKPIVFVLHTFLSAKVTRMGLLV

SEQ ID NO: 475 - DNA, 3111 bp, Homo sapiens; identical to SEQ ID NO: 217

SEQ ID NO: 476 - protein, 707 aa, Homo sapiens; identical to SEQ ID NO: 218

SEQ ID NO: 477 - DNA, 2151 bp, Homo sapiens; identical to SEQ ID NO: 219

SEQ ID NO: 478 - protein, 677 aa, Homo sapiens; identical to SEQ ID NO: 220

SEQ ID NO: 479 - DNA, 2348 bp, Homo sapiens; identical to SEQ ID NO: 221

SEQ ID NO: 480 - protein, 662 aa, Homo sapiens; identical to SEQ ID NO: 222

SEQ ID NO: 481 - DNA, 2757 bp, Homo sapiens; identical to SEQ ID NO: 23

SEQ ID NO: 482 - protein, 918 aa, Homo sapiens; identical to SEQ ID NO: 24

SEQ ID NO: 483 - DNA, 2763 bp, Homo sapiens; identical to SEQ ID NO: 25

SEQ ID NO: 484 - protein, 920 aa, Homo sapiens; identical to SEQ ID NO: 26

SEQ ID NO: 485 - DNA, 2874 bp, Homo sapiens; identical to SEQ ID NO: 27

SEQ ID NO: 486 - protein, 957 aa, Homo sapiens; identical to SEQ ID NO: 28

SEQ ID NO: 487 - DNA, 2871 bp, Homo sapiens; identical to SEQ ID NO: 29

SEQ ID NO: 488 - protein, 956 aa, Homo sapiens; identical to SEQ ID NO: 30

SEQ ID NO: 489 - DNA, 1431 bp, Homo sapiens
atgtccacgcagagacttcggaatgaagactaccacgactacagctccacggacgtgagccctgaggagagcccgtcggaaggcctcaacaacctctcctccccgggctcctaccagcgctttggtcaaagcaatagcacaacatggttccagaccttgatccacctgttaaaaggcaacattggcacaggactcctgggactccctctggcggtgaaaaatgcaggcatcgtgatgggtcccatcagcctgctgatcataggcatcgtggccgtgcactgcatgggtatcctggtgaaatgtgctcaccacttctgccgcaggctgaataaatcctttgtggattatggtgatactgtgatgtatggactagaatccagcccctgctcctggctccggaaccacgcacactggggaagacgtgttgtggacttcttcctgattgtcacccagctgggattctgctgtgtctattttgtgtttctggctgacaactttaaacaggtgatagaagcggccaatgggaccaccaataactgccacaacaatgagacggtgattctgacgcctaccatggactcgcgactctacatgctctccttcctgcccttcctggtgctgctggttttcatcaggaacctccgagccctgtccatcttctccctgttggccaacatcaccatgctggtcagcttggtcatgatctaccagttcattgttcagaggatcccagaccccagccacctccccttggtggccccttggaagacctaccctctcttctttggcacagcgattttttcatttgaaggcattggaatggttctgcccctggaaaacaaaatgaaggatcctcggaagttcccactcatcctgtacctgggcatggtcatcgtcaccatcctctacatcagcctggggtgtctggggtacctgcaatttggagctaatatccaaggcagcataaccctcaacctgcccaactgctggttgtaccagtcagttaagctgctgtactccatcgggatctttttcacctacgcactccagttctacgtcccggctgagatcatcatccccttctttgtgtcccgagcgcccgagcactgtgagttagtggtggacctgtttgtgcgcacagtgctggtctgcctgacatgcatcttggccatcctcatcccccgcctggacctggtcatctccctggtgggctccgtgagcagcagcgccctggccctcatcatcccaccgctcctggaggtcaccaccttctactcagagggcatgagccccctcaccatctttaaggacgccctgatcagcatcctgggcttcgtgggctttgtggtggggacctatgaggctctctatgagctgatccagccaagcaatgctcccatcttcatcaattccacctgtgccttcatatag

SEQ ID NO: 490 - protein, 476 aa, Homo sapiens
MSTQRLRNEDYHDYSSTDVSPEESPSEGLNNLSSPGSYQRFGQSNSTTWFQTLIHLLKGNIGTGLLGLPLAVKNAGIVMGPISLLIIGIVAVHCMGILVKCAHHFCRRLNKSFVDYGDTVMYGLESSPCSWLRNHAHWGRRVVDFFLIVTQLGFCCVYFVFLADNFKQVIEAANGTTNNCHNNETVILTPTMDSRLYMLSFLPFLVLLVFIRNLRALSIFSLLANITMLVSLVMIYQFIVQRIPDPSHLPLVAPWKTYPLFFGTAIFSFEGIGMVLPLENKMKDPRKFPLILYLGMVIVTILYISLGCLGYLQFGANIQGSITLNLPNCWLYQSVKLLYSIGIFFTYALQFYVPAEIIIPFFVSRAPEHCELVVDLFVRTVLVCLTCILAILIPRLDLVISLVGSVSSSALALIIPPLLEVTTFYSEGMSPLTIFKDALISILGFVGFVVGTYEALYELIQPSNAPIFINSTCAFI

SEQ ID NO: 491 - DNA, 732 bp, Homo sapiens
atgtccacgcagagacttcggaatgaagactaccacgactacagctccacggacgtgagccctgaggagagcccgtcggaaggcctcaacaacctctcctccccgggctcctaccagcgctttggtcaaagcaatagcacaacatggttccagaccttgatccacctgttaaaaggcaacattggcacaggactcctgggactccctctggcggtgaaaaatgcaggcatcgtgatgggtcccatcagcctgctgatcataggcatcgtggccgtgcactgcatgggtatcctggtgaaatgtgctcaccacttctgccgcaggctgaataaatcctttgtggattatggtgatactgtgatgtatggactagaatccagcccctgctcctggctccggaaccacgcacactggggaagacgtgttgtggacttcttcctgattgtcacccagctgggattctgctgtgtctattttgtgtttctggctgacaactttaaacaggtgatagaagcggccaatgggaccaccaataactgccacaacaatgagacggtgattctgacgcctaccatggactcgcgactctacatgctctccttcctgcccttcctggtgctgctggttttcatcaggaacctccgagccctgtccatcttctccctgttggccaacatcaccatgctggtcagcttggtcatgatctaccagttcattgttcagatcctgtga

SEQ ID NO: 492 - protein, 243 aa, Homo sapiens
MSTQRLRNEDYHDYSSTDVSPEESPSEGLNNLSSPGSYQRFGQSNSTTWFQTLIHLLKGNIGTGLLGLPLAVKNAGIVMGPISLLIIGIVAVHCMGILVKCAHHFCRRLNKSFVDYGDTVMYGLESSPCSWLRNHAHWGRRVVDFFLIVTQLGFCCVYFVFLADNFKQVIEAANGTTNNCHNNETVILTPTMDSRLYMLSFLPFLVLLVFIRNLRALSIFSLLANITMLVSLVMIYQFIVQIL

SEQ ID NO: 493 - DNA, 1305 bp, Homo sapiens
atgtccacgcagagacttcggaatgaagactaccacgactacagctccacggacgtgagccctgaggagagcccgtcggaaggcctcaacaacctctcctccccgggctcctaccagcgctttggtcaaagcaatagcacaacatggttccagaccttgatccacctgttaaaaggcaacattggcacaggactcctgggactccctctggcggtgaaaaatgcaggcatcgtgatgggtcccatcagcctgctgatcataggcatcgtggccgtgcactgcatgggtatcctggtgaaatgtgctcaccacttctgccgcaggctgaataaatcctttgtggattatggtgatactgtgatgtatggactagaatccagcccctgctcctggctccggaaccacgcacactggggaagacgtgttgtggacttcttcctgattgtcacccagctgggattctgctgtgtctattttgtgtttctggctgacaactttaaacaggtgatagaagcggccaatgggaccaccaataactgccacaacaatgagacggtgattctgacgcctaccatggactcgcgactctacatgctctccttcctgcccttcctggtgctgctggttttcatcaggaacctccgagccctgtccatcttctccctgttggccaacatcaccatgctggtcagcttggtcatgatctaccagttcattgttcagaggatcccagaccccagccacctccccttggtggccccttggaagacctaccctctcttctttggcacagcgattttttcatttgaaggcattggaatggttctgcccctggaaaacaaaatgaaggatcctcggaagttcccactcatcctgtacctgggcatggtcatcgtcaccatcctctacatcagcctggggtgtctggggtacctgcaatttggagctaatatccaaggcagcataaccctcaacctgcccaactgctggttgtaccagtcagttaagctgctgtactccatcgggatctttttcacctacgcactccagttctacgtcccggctgaggtcatctccctggtgggctccgtgagcagcagcgccctggccctcatcatcccaccgctcctggaggtcaccaccttctactcagagggcatgagccccctcaccatctttaaggacgccctgatcagcatcctgggcttcgtgggctttgtggtggggacctatgaggctctctatgagctgatccagccaagcaatgctcccatcttcatcaattccacctgtgccttcatatag

SEQ ID NO: 494 - protein, 434 aa, Homo sapiens
MSTQRLRNEDYHDYSSTDVSPEESPSEGLNNLSSPGSYQRFGQSNSTTWFQTLIHLLKGNIGTGLLGLPLAVKNAGIVMGPISLLIIGIVAVHCMGILVKCAHHFCRRLNKSFVDYGDTVMYGLESSPCSWLRNHAHWGRRVVDFFLIVTQLGFCCVYFVFLADNFKQVIEAANGTTNNCHNNETVILTPTMDSRLYMLSFLPFLVLLVFIRNLRALSIFSLLANITMLVSLVMIYQFIVQRIPDPSHLPLVAPWKTYPLFFGTAIFSFEGIGMVLPLENKMKDPRKFPLILYLGMVIVTILYISLGCLGYLQFGANIQGSITLNLPNCWLYQSVKLLYSIGIFFTYALQFYVPAEVISLVGSVSSSALALIIPPLLEVTTFYSEGMSPLTIFKDALISILGFVGFVVGTYEALYELIQPSNAPIFINSTCAFI

SEQ ID NO: 495 - DNA, 1161 bp, Homo sapiens
atgtccacgcagagacttcggaatgaagactaccacgactacagctccacggacgtgagccctgaggagagcccgtcggaaggcctcaacaacctctcctccccgggctcctaccagcgctttggtcaaagcaatagcacaacatggttccagaccttgatccacctgttaaaaggcaacattggcacaggactcctgggactccctctggcggtgaaaaatgcaggcatcgtgatgggtcccatcagcctgctgatcataggcatcgtggccgtgcactgcatgggtatcctggtgaaatgtgctcaccacttctgccgcaggctgaataaatcctttgtggattatggtgatactgtgatgtatggactagaatccagcccctgctcctggctccggaaccacgcacactggggaagacgtgttgtggacttcttcctgattgtcacccagctgggattctgctgtgtctattttgtgtttctggctgacaactttaaacaggtgatagaagcggccaatgggaccaccaataactgccacaacaatgagacggtgattctgacgcctaccatggactcgcgactctacatgctctccttcctgcccttcctggtgctgctggttttcatcaggaacctccgagccctgtccatcttctccctgttggccaacatcaccatgctggtcagcttggtcatgatctaccagttcattgttcagaggatcccagaccccagccacctccccttggtggccccttggaagacctaccctctcttctttggcacagcgattttttcatttgaaggcattggaatggttctgcccctggaaaacaaaatgaaggatcctcggaagttcccactcatcctgtacctgggcatggtcatcgtcaccatcctctacatcagcctggggtgtctggggtacctgcaatttggagctaatatccaaggcagcataaccctcaacctgcccaactgctggttgtaccagtcagttaagctgctgtactccatcgggatctttttcacctacgcactccagttctacgtcccggctgagatcatcatccccttctttgtgtcccgagcgcccgagcactgtgagttagtggtggacctgtttgtgcgcacagtgctggtctgcctgacatga

SEQ ID NO: 496 - protein, 386 aa, Homo sapiens
MSTQRLRNEDYHDYSSTDVSPEESPSEGLNNLSSPGSYQRFGQSNSTTWFQTLIHLLKGNIGTGLLGLPLAVKNAGIVMGPISLLIIGIVAVHCMGILVKCAHHFCRRLNKSFVDYGDTVMYGLESSPCSWLRNHAHWGRRVVDFFLIVTQLGFCCVYFVFLADNFKQVIEAANGTTNNCHNNETVILTPTMDSRLYMLSFLPFLVLLVFIRNLRALSIFSLLANITMLVSLVMIYQFIVQRIPDPSHLPLVAPWKTYPLFFGTAIFSFEGIGMVLPLENKMKDPRKFPLILYLGMVIVTILYISLGCLGYLQFGANIQGSITLNLPNCWLYQSVKLLYSIGIFFTYALQFYVPAEIIIPFFVSRAPEHCELVVDLFVRTVLVCLT

SEQ ID NO: 497 - DNA, 1713 bp, Homo sapiens; identical to SEQ ID NO: 17

SEQ ID NO: 498 - protein, 570 aa, Homo sapiens; identical to SEQ ID NO: 18

SEQ ID NO: 499 - DNA, 677 bp, Homo sapiens
atggcagggaaagacattcccggtcaggcatctctggtgtttgatgttgcattattggacctccataaccccaaggacagcatttccattgagaacaaggtagtacctgaaaactgtgagcggataagtcaaagtggggactttctcaggtatcattacaatggcacgcttctggatggcaccctctttgattccagctactctcggaaccgcacgtttgacacgtacattgggcagggctacgtgattcctgggatggatgaaggtctacttggtgtttgcattggagaaaagcgaaggattgtggtcccgcctcacctggggtatggagaggaaggaagagggaatatccccggctcggctgtgctggtgtttgacatccatgtgatcgacttccacaacccttcggactccatcagcatcacctcccactacaaaccccctgactgctcagtgctgagtaagaagggagattacctcaaatatcactacaatgcctcacttctggatgggaccctgctggactccacgtggaatttaggcaaaacttacaatattgttctgggatctgggcaagttgtgttggggatggacatgggtctcagagagatgtgcgttggcgagaaacggacagtgatcattccgcctcacctgggctatggggaagctggcgtggg

SEQ ID NO: 500 - protein, 226 aa, Homo sapiens [sequence omitted]

SEQ ID NO: 501 - DNA, 2649 bp, Homo sapiens
atgcctgccctggcatgcctccggaggctgtgtcggcacgtgtccccgcaggctgtccttttcctgctgttcatcttctgcctgttcagcgttttcatctcggcctactacctatatggctggaagcgaggcctggagccctcggcggatgcccccgagcctgactgcggggacccgccgcctgtggcccccagtcgcctgctgccactcaagcctgtgcaggcagccaccccttcccgcacagacccgttggtgctggtctttgtggagagcctctactcgcaactgggccaggaggtggtggccatcctggagtccagccgcttcaaataccgcacagagattgcgccgggcaagggtgacatgcccacgctcactgacaagggccgtggccgcttcgccctcatcatctatgagaacatcctcaagtatgtcaacctggacgcctggaaccgggagctgctggacaagtactgtgtggcctacggcgtgggcatcattggcttcttcaaggccaatgagaacagcctgctgagtgcgcagctcaagggcttccccctgttcctgcactcaaacctgggcctgaaggactgcagcatcaaccccaagtccccgctgctctacgtgacgcgacctagcgaggtggagaaaggtgtgctccccggcgaggactggacggttttccagtcaaatcactccacctatgagccagtgctgctggccaagacgcgctcgtctgagtccatcccacacctgggcgcagacgccggcctgcatgctgcactgcacgccactgtggtccaggacctgggcctgcacgacggcatccagcgcgtgctgtttggcaacaacctgaacttctggctgcacaagcttgtcttcgtggatgccgtggccttcctcacggggaagcgcctctccctgccattggaccgctacatcctggtggacattgatgacatcttcgtgggcaaggagggcacacgcatgaaggtggaggacgtgaaggccctgtttgacacacagaacgaactacgcgcacacatcccaaacttcaccttcaacctgggctactcagggaaattcttccacacaggtaccaatgctgaggacgctggggatgatctgctgctgtcgtatgtgaaggagttctggtggttcccccacatgtggagccacatgcagccccaccttttccacaaccagtccgtgttggccgagcagatggccttgaacaagaagttcgctgtcgagcatggcattcccacagacatggggtatgcagtggcgccccaccactcgggcgtgtaccccgtgcacgtgcagctgtacgaggcttggaagcaggtgtggagcatccgcgtgaccagcacggaggagtacccccacctgaagccagcccgctaccgccgtggcttcatccacaatggcatcatggttctcccacggcagacctgcggcctcttcacacacaccatcttctacaacgagtaccctggcggctccagtgagctggacaagatcatcaacgggggcgagctcttcctcaccgtgctcctcaatcctatcagcatcttcatgacgcacctgtccaactatgggaatgaccgcctgggcctgtacaccttcaagcacctggtgcgcttcctgcactcctggacgaacctccggctgcagacactgccccctgtgcagttggcgcagaagtacttccagatcttctccgaggagaaggacccgctctggcaggacccctgcgaggacaaacgtcacaaagacatctggtccaaggagaagacgtgtgaccgcttcccaaagctcctcatcatcggcccccagaaaacaggcaccactgccctctacctgttcctgggcatgcaccctgacctaagcagcaactaccccagctctgagacctttgaggagatccagttttttaatggccacaactatcacaaaggcatcgactggtacatggagttcttccccatcccttccaacaccacctccgacttctactttgagaaaagcgccaactactttgattcagaagtggcgccccggcgggcagcagccctcttgcccaaagccaaggtcctgaccatcctcatcaaccccgcggaccgggcctattcctggtaccagcaccagcgagcccatgacgacccagtggccctaaagtacaccttccatgaggtgattaccgccggctctgacgcatcctcgaagctgcgtgccctccagaaccgctgcctggtccctggctggtacgccacccacatcgagcgctggctcagtgcctatcacgccaaccagattctggtcttggatggcaaactgcttcgcacagaacctgccaaagtgatggacatggtgcagaagttccttggggtgaccaacaccattgactaccacaaaaccttggcgtttgatccaaagaaaggattttggtgccaactgcttgaaggaggaaaaaccaagtgtctgggcaaaagcaagggccggaaatatcccgagatggacttggattcccgagccttcctgaaggactattaccgggaccacaacatcgagctctccaagctgctgtataagatgggccagacacttcccacttggctacgagaggacctccagaacaccaggtag

SEQ ID NO: 502 - protein, 882 aa, Homo sapiens
MPALACLRRLCRHVSPQAVLFLLFIFCLFSVFISAYYLYGWKRGLEPSADAPEPDCGDPPPVAPSRLLPLKPVQAATPSRTDPLVLVFVESLYSQLGQEVVAILESSRFKYRTEIAPGKGDMPTLTDKGRGRFALIIYENILKYVNLDAWNRELLDKYCVAYGVGIIGFFKANENSLLSAQLKGFPLFLHSNLGLKDCSINPKSPLLYVTRPSEVEKGVLPGEDWTVFQSNHSTYEPVLLAKTRSSESIPHLGADAGLHAALHATVVQDLGLHDGIQRVLFGNNLNFWLHKLVFVDAVAFLTGKRLSLPLDRYILVDIDDIFVGKEGTRMKVEDVKALFDTQNELRAHIPNFTFNLGYSGKFFHTGTNAEDAGDDLLLSYVKEFWWFPHMWSHMQPHLFHNQSVLAEQMALNKKFAVEHGIPTDMGYAVAPHHSGVYPVHVQLYEAWKQVWSIRVTSTEEYPHLKPARYRRGFIHNGIMVLPRQTCGLFTHTIFYNEYPGGSSELDKIINGGELFLTVLLNPISIFMTHLSNYGNDRLGLYTFKHLVRFLHSWTNLRLQTLPPVQLAQKYFQIFSEEKDPLWQDPCEDKRHKDIWSKEKTCDRFPKLLIIGPQKTGTTALYLFLGMHPDLSSNYPSSETFEEIQFFNGHNYHKGIDWYMEFFPIPSNTTSDFYFEKSANYFDSEVAPRRAAALLPKAKVLTILINPADRAYSWYQHQRAHDDPVALKYTFHEVITAGSDASSKLRALQNRCLVPGWYATHIERWLSAYHANQILVLDGKLLRTEPAKVMDMVQKFLGVTNTIDYHKTLAFDPKKGFWCQLLEGGKTKCLGKSKGRKYPEMDLDSRAFLKDYYRDHNIELSKLLYKMGQTLPTWLREDLQNTR

SEQ ID NO: 503 - DNA, 1671 bp, Homo sapiens
atgcctgccctggcatgcctccggaggctgtgtcggcacgtgtccccgcaggctgtccttttcctgctgttcatcttctgcctgttcagcgttttcatctcggcctactacctatatggctggaagcgaggcctggagccctcggcggatgcccccgagcctgactgcggggacccgccgcctgtggcccccagtcgcctgctgccactcaagcctgtgcaggcagccaccccttcccgcacagacccgttggtgctggtctttgtggagagcctctactcgcaactgggccaggaggtggtggccatcctggagtccagccgcttcaaataccgcacagagattgcgccgggcaagggtgacatgcccacgctcactgacaagggccgtggccgcttcgccctcatcatctatgagaacatcctcaagtatgtcaacctggacgcctggaaccgggagctgctggacaagtactgtgtggcctacggcgtgggcatcattggcttcttcaaggccaatgagaacagcctgctgagtgcgcagctcaagggcttccccctgttcctgcactcaaacctgggcctgaaggactgcagcatcaaccccaagtccccgctgctctacgtgacgcgacctagcgaggtggagaaaggtgtgctccccggcgaggactggacggttttccagtcaaatcactccacctatgagccagtgctgctggccaagacgcgctcgtctgagtccatcccacacctgggcgcagacgccggcctgcatgctgcactgcacgccactgtggtccaggacctgggcctgcacgacggcatccagcgcgtgctgtttggcaacaacctgaacttctggctgcacaagcttgtcttcgtggatgccgtggccttcctcacggggaagcgcctctccctgccattggaccgctacatcctggtggacattgatgacatcttcgtgggcaaggagggcacacgcatgaaggtggaggacgtgaaggccctgtttgacacacagaacgaactacgcgcacacatcccaaacttcaccttcaacctgggctactcagggaaattcttccacacaggtaccaatgctgaggacgctggggatgatctgctgctgtcgtatgtgaaggagttctggtggttcccccacatgtggagccacatgcagccccaccttttccacaaccagtccgtgttggccgagcagatggccttgaacaagaagttcgctgtcgagcatggcattcccacagacatggggtatgcagtggcgccccaccactcgggcgtgtaccccgtgcacgtgcagctgtacgaggcttggaagcaggtgtggagcatccgcgtgaccagcacggaggagtacccccacctgaagccagcccgctaccgccgtggcttcatccacaatggcatcatggttctcccacggcagacctgcggcctcttcacacacaccatcttctacaacgagtaccctggcggctccagtgagctggacaagatcatcaacgggggcgagctcttcctcaccgtgctcctcaatcctgtgagtgctccacagcccatggctgctggtgagaaggggctgctgcacagcctgtctgcagctgacacaggcttcctggagccaggaaagggtggagaggcatga

SEQ ID NO: 504 - protein, 556 aa, Homo sapiens
MPALACLRRLCRHVSPQAVLFLLFIFCLFSVFISAYYLYGWKRGLEPSADAPEPDCGDPPPVAPSRLLPLKPVQAATPSRTDPLVLVFVESLYSQLGQEVVAILESSRFKYRTEIAPGKGDMPTLTDKGRGRFALIIYENILKYVNLDAWNRELLDKYCVAYGVGIIGFFKANENSLLSAQLKGFPLFLHSNLGLKDCSINPKSPLLYVTRPSEVEKGVLPGEDWTVFQSNHSTYEPVLLAKTRSSESIPHLGADAGLHAALHATVVQDLGLHDGIQRVLFGNNLNFWLHKLVFVDAVAFLTGKRLSLPLDRYILVDIDDIFVGKEGTRMKVEDVKALFDTQNELRAHIPNFTFNLGYSGKFFHTGTNAEDAGDDLLLSYVKEFWWFPHMWSHMQPHLFHNQSVLAEQMALNKKFAVEHGIPTDMGYAVAPHHSGVYPVHVQLYEAWKQVWSIRVTSTEEYPHLKPARYRRGFIHNGIMVLPRQTCGLFTHTIFYNEYPGGSSELDKIINGGELFLTVLLNPVSAPQPMAAGEKGLLHSLSAADTGFLEPGKGGEA

SEQ ID NO: 505 - DNA, 14953 bp, Homo sapiens
atggggcctgtgtgggaaggtatggcctcacatgtgcaagttttctcccctcacacccttcaatcaagtgccttctgtagtgtgaagaaactgaaaatagagccgagttccaactgggacatgactgggtacggctcccacagcaaagtgtatagccagagcaagaacatccccctgtcgcagccagccaccacaaccgtcagcacctccttgccggtcccaaacccaagcctaccttacgagcagaccatcgtcttcccaggaagcaccgggcacatcgtggtcacctcagcaagcagcacttctgtcaccgggcaagtcctcggcggaccacacaacctaatgcgtcgaagcactgtgagcctccttgatacctaccaaaaatgtggactcaagcgtaagagcgaggagatcgagaacacaagcagcgtgcagatcatcgaggagcatccacccatgattcagaataatgcaagcggggccactgtcgccactgccaccacgtctactgccacctccaaaaacagcggctccaacagcgagggcgactatcagctggtgcagcatgaggtgctgtgctccatgaccaacacctacgaggtcttagagttcttgggccgagggacgtttgggcaagtggtcaagtgctggaaacggggcaccaatgagatcgtagccatcaagatcctgaagaaccacccatcctatgcccgacaaggtcagattgaagtgagcatcctggcccggttgagcacggagagtgccgatgactataacttcgtccgggcctacgaatgcttccagcacaagaaccacacgtgcttggtcttcgagatgttggagcagaacctctatgactttctgaagcaaaacaagtttagccccttgcccctcaaatacattcgcccagttctccagcaggtagccacagccctgatgaaactcaaaagcctaggtcttatccacgctgacctcaaaccagaaaacatcatgctggtggatccatctagacaaccatacagagtcaaggtcatcgactttggttcagccagccacgtctccaaggctgtgtgctccacctacttgcagtccagatattacagggcccctgagatcatccttggtttaccattttgtgaggcaattgacatgtggtccctgggctgtgttattgcagaattgttcctgggttggccgttatatccaggagcttcggagtatgatcagattcggtatatttcacaaacacagggtttgcctgctgaatatttattaagcgccgggacaaagacaactaggtttttcaaccgtgacacggactcaccatatcctttgtggagactgaagacaccagatgaccatgaagcagagacagggattaagtcaaaagaagcaagaaagtacattttcaactgtttagatgatatggcccaggtgaacatgacgacagatttggaagggagcgacatgttggtagaaaaggctgaccggcgggagttcattgacctgttgaagaagatgctgaccattgatgctgacaagagaatcactccaatcgaaaccctgaaccatccctttgtcaccatgacacacttactcgattttccccacagcacacacgtcaaatcatgtttccagaacatggagatctgcaagcgtcgggtgaatatgtatgacacggtgaaccagagcaaaacccctttcatcacgcacgtggcccccagcacgtccaccaacctgaccatgacctttaacaaccagctgaccactgtccacaaccaggctccctcctctaccagtgccactatttccttagccaatcccgaagtctccatactaaactacccatctacactctaccagccctcagcggcatccatggctgcagtggcccagcggagcatgcccctgcagacaggaacagcccagatttgtgcccggcctgacccgttccagcaagctctcatcgtgtgtccccccggcttccaaggcttgcaggcctctccctctaagcacgctggctactcggtgcgaatggaaaatgcagttcccatcgtcactcaagccccaggagctcagcctcttcagatccaaccaggtctgcttgcccagcaggcttggccaagtgggacccagcagatcctgcttcccccagcatggcagcaactgactggagtggccacccacacatcagtgcagcatgccaccgtgattcccgagaccatggcaggcacccagcagctggcggactggagaaatacgcatgctcacggaagccattataatcccatcatgcagcagcctgcactattgaccggtcatgtgacccttccagcagcacagcccttaaatgtgggtgtggcccacgtgatgcggcagcagccaaccagcaccacctcctcccggaagagtaagcagcaccagtcatctgtgagaaatgtctccacctgtgaggtgtcctcctctcaggccatcagctccccacagcgatccaagcgtgtcaaggagaacacacctccccgctgtgccatggtgcacagtagcccggcctgcagcacctcggtcacctgtgggtggggcgacgtggcctccagcaccacccgggaacggcagcggcagacaattgtcattcccgacactcccagccccacggtcagcgtcatcaccatcagcagtgacacggacgaggaggaggaacagaaacacgcccccaccagcactgtctccaagcaaagaaaaaacgtcatcagctgtgtcacagtccacgactccccctactccgactcctccagcaacaccagcccctactccgtgcagcagcgtgctgggcacaacaatgccaatgcctttgacaccaaggggagcctggagaatcactgcacggggaacccccgaaccatcatcgtgccacccctgaaaacccaggccagcgaagtattggtggagtgtgatagcctggtgccagtcaacaccagtcaccactcgtcctcctacaagtccaagtcctccagcaacgtgacctccaccagcggtcactcttcagggagctcatctggagccatcacctaccggcagcagcggccgggcccccacttccagcagcagcagccactcaatctcagccaggctcagcagcacatcaccacggaccgcactgggagccaccgaaggcagcaggcctacatcactcccaccatggcccaggctccgtactccttcccgcacaacagccccagccacggcactgtgcacccgcatctggctgcagccgctgccgctgcccacctccccacccagccccacctctacacctacactgcgccggcggccctgggctccaccggcaccgtggcccacctggtggcctcgcaaggctctgcgcgccacaccgtgcagcacactgcctacccagccagcatcgtccaccaggtccccgtgagcatgggcccccgggtcctgccctcgcccaccatccacccgagtcagtatccagcccaatttgcccaccagacctacatcagcgcctcgccagcctccaccgtctacactggatacccactgagccccgccaaggtcaaccagtacccttacatataaacactggaggggagggagggagggagggagggagagaatggcccgagggaggagggagagaaggagggaggcgctcctgggaccgtgggcgctggccttttatactgaagatgccgcacacaaacaatgcaaacggggcaggggcgggggggggggggggggcagagggcagggggacgggtcgggacaccagtgaaacttgaaccgggaagtgggaggacgtagagcagagaagagaacatttttaaaaggaagggattaaagagggtgggaaatctatggtttttattttaaaaaagaaaaaggaaaaaaaaaaagtcaataacaaaaaacccagctcaagaacccattctacgccaaactggaaaggagaagagagcaacaggaagattccagaaacggggggccccagtttttgaagaactttatgaacttttcaaagattattttcatatggcagcaagtgatacggaagactgctgtcagggacacctgatatggaaatcaaatagatttttaattaattgaacataagatttagggatttttccagaactcgaaagggtcaacagccctccagaatgtcgggctgcagcctgaggaggctgatgtttggagctggtgtgggattggcgaagcccagtccgggctccctagtcaggaaagacgggggacggccaggctgctggaaggcccccgggggcgcggggcgagttttctttttctgagcactctggataaatccctaagcaacgttgtttctcaaatgtcattaataatgtgtgttgcaaactttaggtttttttcttttctgaaaatgtattttctctttgaatccacccctagtcgcgtagcgtagggctagcggtcgtcacagacaccctagtagaatgtagcactcagcacccttgtctcctaccttgtgttcaactccaatgataccaatagaatattcctcaatgtaattgcacaaaaaaaagcgatataacataggcatgtaaccaatgtggcggtgcaggtgtgcgggtgagcgagcacgtgtgggtgtgcacgcgccgccctccccgcgtggccctcggcgccgccaccctagctggcgcagtcttgacactgcatccttccctcctagtgccttaccgagcgacagacgcggcgtgagggtttacttccactggtactccaagaaactgaggctagtcagacacaatctcagctcttctgttgtgctgttgtaacagtttacgctggccttttttttttctttttctttttctttttaaaatgttaatgcccgttgtctttcctgggctgtttgctagcggaaggatgccagggaagccagcaggagctaggagagagtccgtggatctcgaaagaaatatgggagacagatgcccggcgggtgcgtctggagatggggacggcgggagttgagttgtggcagtagttgagttgtaatttgtgggcggaggcccagagagactccccacccttcacccctgccccactctgtccccagttccgccatttgtgaggccagaggtttccggactgttggcctcgccaggcagccgtctcccgccccaggcggcatcccccagtccctcccgcctccacgagagcctggagctctcagcctcgcccggggctccactctctcctccggctccctgggctgttttgctctaacgatcttgccagatccctccctctgtagacaaccaccaacctctgtttgctgttgaattctctcctcacattacccaggtctgctcaagacatgattttggttttggtttctgagggttctagtgggcagaaggttggagggacacttatgagggtggccgggggtctgacgctgcactttggaaaaactcacacagttgaatttccaaagaaatctgccctttgccctctttgcacctttgatacattctggaagttttctcaggctttggacacttctggggatggaggtgtggagaagtggggagttccctctcttcatagtaaataactctgaaatatgtgaatgtgaatggcaggagaatctggccaaggatggggccgaaaagggtggttctaattgtttgcttctgatgttgagtctttagctgaccccacaggcaggtttccaaggtgcaaagagatctttcccgagtcagcggccccatcctcatcctccctccctttacttcctcactgtgcagtctccctcaaggatctactgtgaaaggtgtgtttgtagtgatatccaacctaactcagtaacgaagtcgttacttagctcttagctgtgaaataactctggaaacttccccaccccaaccataaattcttacttataaagaaacaggtccccaaactggaaacagcttagtccaggcctcagcgagaaggaaggacaccatgactgctccatgctgggcacagccgggcagtcttgccaagtgcctgctggaggctgtgccggcaagaggcctgcagcaaggagattcccttccctcgggccattatcaatactgtctttatctggaggtggggaagcgcagccctctgagacagcaggacaatggtcagttcagagagggtgagggcagcaaacgcttcagaggacacagaagccagaggacccccccccgccccacagctgggtcagcctggaaaatccatctattagggactttttggcagccagatggcagcaatagcccattaggtctcatcccgagttccaagtcttggctgcaaatgagcctcagttcgccttactggagagcacccccagattcctgggcacagttcatttccagccctttctagatctgatcttttagggggaaagacagcttaaaatgttcttttcattttaaagaaaattattctgtctgcttaagttggaggctacttactctttcacctgacattttctttccttttattcttccagatcaggaatgaaatttccatgctgctcataaagataatattattgtactaattatttttattaccattgtaattatgatcattatgttgatattttagtcagggttttaaatgcacatttattccaagtatctttgtgttttctctttaatatttaaacttattctctctgtgagtatataagtagactggagggacatccagatgtccagttttgtcaggcaaaaaaaaaaaggaaagacttaggaagtaggaaaattgtttctgtcatctctatcccaacaagagacgtcaagaaagatccaccacagaacaaaagtttaaagaagaatcaaagccttgattgggcttctgacaacatggtcaccatcaaggttgtcattttctagatcccagaggcctgggatgcgacgtcaggtggcatctcatgggctcggggaatgtcgagtcactgactgtccagcccttagccagcttctctcccacatcctcagagctctcctgtgcttctgaaatctgttaactaaatctttggcttgcctctggtatttaagcaagaaaattccctcccagaggtgaccccatccgcttccccacaatccatccttttgccatcggcgcacctggggcgtggcttaggttcttcaatgcagggacatttgccccctcccagaagctgctgggcacagtgaggtggcgtaagagtgactggcaggtggtaccttccccaggaaatttcaccacaccacccagttcctcagcctgccccctccccctgtgatgcatgcccccagcacccaattctagccagctggaagtgggtggagggacagcaggaggccagagaaaccctgaacaaagctgggcggctgctcaggcatcacaggctgcaccccctctgaaagcatccccactgggctccggccacatcttcagtgcactgtgctgtgtgcgctgggtgctcacacgctgtccccagacccacaaagtgctaggccccagttgaagaaaggggtgaaatagccagcttcaccgaagggaagggaagggaagtattgggcgatgccagccccacagacgctcagcaaacattagtgcacattctcctagtcctcacccaatggcctcctctacccccatgcatggagctgccacatcagaagccccaagagaagctccctgcaggagaggccagctccctggatgcccaattgcatacctggccgaatctgccattgagtcaccttagcaaataggctgctgtcactaggaccaagctctcaagcagagggatgccaacctagtccttacttagcccacgaatcatctagagcatcctctagtcttttgtgggctccctccttcccatttgaagagacattgttcagaggaagaggggaagatttgaaatgtcaggtcacggaggagtgtttaactggagcctggtgaaccgcagggcaatttgcttctgctcactgggttctgactggcccgtctggacgtgggcccccatgtctctgtgcttagggcctcttcatgatgttttggatgtttccaagggaagtgggtgagcagatcaaggggtgggagagtcgaggcttgatgccagttaatactgtgaagtggagcgtgcggtcagtggaattcagaggaaaaagaagggttggagcaaagcggcattcatctcctggactgttagcctttctagtcttcctggtggctgaggtgttcacgggctgggggagccagctgacctttgtcctcttcaacctagaagactcagcccgcccagacaccaacgtgtgagacggatggacatcaggaagggaaggggagattagcccaactgctgacagaacgatttcccttggttggaccttgggaatggcaaacactcatattggaacaagcttggggtggaagatttaggccgtgtgagcatgtgtgagtgagtggaacaaactttcttggaaactggagggaggagatgaggaggcttcgggaagtattactgatggctcatggttgagagagcgacgtggggacccagctcgccccagcttttgtcccaggttctctttgtctgatgctgagggcagggtggggtgtgggaccaccactcttgttggcctgtcaagtagaccctaggacagaaaatggaaagaaggaaatggctcggtgctctcaactagcagagagaattgaggagaggtaagggttccttctgcaggccagcctgggactccacagcgccagcaggagtgacttggccacaagacattccagccccagggactttgcaggcttcattccctgtctgtgtcttttccttctggtgtgttttacagacttctgatggggaagcttcaaacttgagcaggccagagatgtccttaccaaattggaaaggaaggtgaaactgttcctttctttagccaaagaacccttctcaaagacgcctccagaaatggacaaaatggccttcccttcgttcctttccaggcaataatgacatcattagtgatgcaattctatttgtctttctctttcctctctgtccttttttttaaaaaaaaaaaatgcatttatttcaaaactgtgctattcttttaagaggagtggaggtgaccccttcgatgctgctgctatcgggagacaaggtgccataccaatacgtgggcttgactaatcccaggccaccatgggagagagcaaagcagggctgccaggagttcagttgcatcaagggcgtagagcacgcgggggctgggctcggaatagcagtacttttccactttgatgccttagaactctcacttctcatctccacagaccagactcagtaaaatctcaggccactagagaatggaaggcggtgaaacaggatttaaatgcaaaaaaaacctattggaggcttttggcaccgtggctcactagagggacccagcatagtagaggtttctcttgttgcagcttctgaaaagttcaaaaaagaactccaggccgttcttccctcaaacccagtgagagtttgcagagaagtgccccctgcagggctcccgtcccagaacaccagcaccagagagggtcttcccgatgccccccgctggacttgcccaagcctctgggagcccctcatctcagatccctgtgttgaacatgacactgactgtcccttatttgttaaaatttgcaatatctctcaagtaaataatagccaacatttgttgaatgctttcatgactcccgggctaaggcctttatgagcgttgtctcaaggggccccaacagccatcccacagggagggggataacagcccccatttatagataagggagctgaccggatgctctgagaagtggcaggtgttgaaggaaggataaagcagtgatgggccagaatccccaaggttcccttttttgttcatcaggcccttcctgagatgtgatttttaatcttttaactttttttaattaatagcaatgcgtggcctcatatttctatgaaccatttagtgatactcccgcttcctgcatgccacacactgtgctgggaattgctcatgggttgtcctgtttcatcttctccgtagccctgtgagatcggcaatattagtccccctacagccaaggaaactgcccagagccacacaactcttgaggggcgaggagggcttgaacctgagtctgcccagctccagaactgagcttgcagccattagccacagctgtctcctgcatgtctgagcaaagaaaggcctttacacagcatcaccctgtgccatcccatgcaccgtgggactcagctaaaggactgtgcaaagagggggctcctgagttggatttaggcaaaaggggcagaattcgtttgatttttagagaaaatctctggagagtttcttttgattcatagaattccttttagatttctttccagcataccaactagctttagtagtgctgctacaaccagctcttataagtaagagtgaaaaagtattcttttcttctttaaaaaataagtttttcttgcttatagttaattctagaaaggcaatactaaaggtatatatttttttcaaaatgctattttttactgcacttgataattatcctgacagctctgatctctgtaatagattcactcttcagctctgggcagaaccagaggcagggttcacaccaaatttgtaaataccatatgtgggtctggtgtccaggaacttttttctttctgttaaaaaaaagaaaaaaaaaagaaaaaaaaaaagaagtagaggtggaagaaagacaagacttagaggaacaaaagaatgttttcttttgagatactcttctcaaagaaatagcaacaattgtataaacaggaaaaccagccagctttcatgataaaaggaaggcgtgtctcttgccctggtatgagattaacagaaatacagatgcatttttattttgattgaaagatggtgagaatgtagaaatgcttaggactagatttttaattttttaaaataactattatcatttattatgaaatatttgttcagttgttttgagtgggtttcttgttccttttttcatttaaaaccttctttgttgactggctccaggcttgtttgcctaaattcttaggtagtttacacaagttctagaatcttttagaactttaactccattggaagcaaacctaactaatcggagtttgagatcctggttggtttcaataggtattctggaattctggcagaacacctaaagattttttttttttttagaaggttttagatacattatcttacacaaactgtgacctaatggcaataattacctcaaatgtgggcattcatcctggttttagccttttttgaaatcatgtagccagcttgatcttggaatttaaagactatgaattctctgtgggctgaaaataatgattacttcatacccccggtcatcgttgcttaagtgaattctgaaaatagctcatctttacaacaaaaattaaaccaaggaagagattattctttgtgtgttgtactcaaatgcgatgttcaaatgcacatgttaagtatatatgtttttagctactgtaaaatgctgttagccttctaagctatcaaaacagtcacattttaaatgagtaaactaaacaattgactgtggatacttaagcatatttctggctacgttttatagttaaagtgttttatagtttacatttagactggtactttttaaagaaaagttctgtttataactgacatccgcaaaccccagtgaatgcctcttagttggaggttgtgtctcccccaaggcaagtgtgttgtcccagactcttctgtagtccagcatgcgcacttccctctggattattactttccacgtgaactcaagagaacatgaaaggcaatccagatggagggaaaaggtgtgagtccgcagcccgggccagatgcgaaggtctcatgcgtgtcgtctaaacacttgtcttcaaggccttctctctgacatcttggaagagtcattgagaacagataacctggttcattgatttttgtcttgatttgaatatttaacttattaatagatccactgatttccaggcaccaggcagtagaagagactgggattcaggtgaccatgaaggcacagctgctacttctgggccgggggtgatattttgatcagcgttttgtaggggaggaccatatacccctattcccatggtcgctggctgggttttccatatatctgctgtcatttattcgttttccccttaaaagcaaaatcaatgtaaaaggctatgtttacgttttactcattgtccagcttagactcaaagtctagttcggtgggagggggaccttagcatcctctcagagatggtcagggctgagcaggaggaggcagagacagaggggcagctcagcctggtccattgagacccactctaaacagacatcatatttggaacaagaagatgcttcgagacaggaatgggccccactgtcatgcagaaacagactgggggaatggcagtttccctgagtcttggtttcttttatgttttctcttgtgccaccaccaaactgcagaggacctgctgtgacctaaagggcattcctttagcagataagaccttgaaaactgcaaaacacctgggaccagggagcttttaaaaaatacaaaaaaataccacatttgctttttccctgtgaactgtattgacagcgtgttcttaggacagtcttttggtggaaatgttactgtaaaatagttttcatctcacccctcctaatcatactcccactttcctgtttgtgtggtggtgttgctgttttttcctttacatgaattaaccaaatgaattttgtgtcattgtttttggggcttatatttttaaaacatagaaattgccttttgttcatttgaaaagtaagtatgttgtatctgaaaaagggctctgcctctgctctccctcgcttccttgtaaccaatctccaaacgaatctctcctggcaccgcccccttccttatatagggtcactgtccccggggccacctctgcctccaccctgctgtcaccactgccctgggccaaggcacccaggactcccagaaagcgcgagagccagcaagaaggccccactcagccttgagactggtggtcacacctccctgtcagagtcgcctgctgggctgaaggggcaatggattgtcattgttgaaattgtttggctcaggttataaggaggaacttgggaagtagaaagtgacttgaccatgtgcatccttggtagcttcctgtaactaacaaatggaacagagagcacacccccgccccgccccaccccaagcagatgttcccgtcagcgctgccctgagtcagtcggtcccccgtttctgctctcctcccttttgtgttcctgctcacttcaagcttcttccatggactttccagggcacagtcatctctagcccccaaatcatctcttcatcctctgtgtgtgcatttttttaaccaaatgaaatagacaagaaagtcatactttggggcagcagaatttctaatttagtagaatcactgtatagagatagatgttgatatatatgtttgtgtatatatatcaaaccaaattggataggagaagtatagctttacagatgaggagaaggagctctttagaggtcggagtcaagactggtgtcttggacgtgcatgggctgtgtcccaggccactccgcacacatggggctgaggcgtggcgccgggcccttgtcatccacctcaccacggcagagccagcaggccctgtagggtgctgctgctgtctcactgggtcccagcttcaagcgcatcagtgggtgacgggggcaacaaatcagagtgactggaagtttccatcccgttttgctttgaccacgtgtactgagctgcagcctctgatactctgtcacgtttccaaaaatggtatccattaggatagaaagagaatggatctgcagaaatgtttacctttcaactgctcatgaattcaggacactggatagaaagactcactccccaaaatgagaacagggaagaggagacccggcgacactaagtcaccaggtccaaggaacgtggctccctccccagggtcatctcacctagatctttctctcccaggtcatctcagctcaatctcaataaccctatgaaagccctggtctgttgtgttccttcaccgtacggtttctgtaataaaaagtgttaatccatgttaatctgtgtgaaaattattgcgtgcaacagtattttctcgtgtacctctttttcctatgtgaattgtccctcttttttatttataaatgtctacttttgtttttttaaagacaaaccaatgtgttgtagacctatatgtaacctattccttagtctcatattataggtatgttataagaatggatattttacttggctttagaatgttttacaagaaaactaattcttaactgatcaagtccttgctactaaaatgcttgtgtttttcatcatgacgtcgtgtgcttctaaattaatcattttcgttgtagaaaaatggagtgaatttatattagtcttggaaactaataatagcattgtaaatttatgagatgattttaacagaaaaaatatagaagaatatagttattttaattgtaatattactaactgtagggtgagaaaaaggggggggggtcccattgtggtgaactatgttatagcttgttactcatagtttctttttgatcattttttcggtctccgaggtgaaatgacttattaattaaaatttgtaaactcacatatgcatattgtatatgtgtagaaatgtaatcacactttgtcttggaattacattaaactgtttgaaatcactgt

SEQ ID NO: 506 - protein, 1198 aa, Homo sapiens
MGPVWEGMASHVQVFSPHTLQSSAFCSVKKLKIEPSSNWDMTGYGSHSKVYSQSKNIPLSQPATTTVSTSLPVPNPSLPYEQTIVFPGSTGHIVVTSASSTSVTGQVLGGPHNLMRRSTVSLLDTYQKCGLKRKSEEIENTSSVQIIEEHPPMIQNNASGATVATATTSTATSKNSGSNSEGDYQLVQHEVLCSMTNTYEVLEFLGRGTFGQVVKCWKRGTNEIVAIKILKNHPSYARQGQIEVSILARLSTESADDYNFVRAYECFQHKNHTCLVFEMLEQNLYDFLKQNKFSPLPLKYIRPVLQQVATALMKLKSLGLIHADLKPENIMLVDPSRQPYRVKVIDFGSASHVSKAVCSTYLQSRYYRAPEIILGLPFCEAIDMWSLGCVIAELFLGWPLYPGASEYDQIRYISQTQGLPAEYLLSAGTKTTRFFNRDTDSPYPLWRLKTPDDHEAETGIKSKEARKYIFNCLDDMAQVNMTTDLEGSDMLVEKADRREFIDLLKKMLTIDADKRITPIETLNHPFVTMTHLLDFPHSTHVKSCFQNMEICKRRVNMYDTVNQSKTPFITHVAPSTSTNLTMTFNNQLTTVHNQAPSSTSATISLANPEVSILNYPSTLYQPSAASMAAVAQRSMPLQTGTAQICARPDPFQQALIVCPPGFQGLQASPSKHAGYSVRMENAVPIVTQAPGAQPLQIQPGLLAQQAWPSGTQQILLPPAWQQLTGVATHTSVQHATVIPETMAGTQQLADWRNTHAHGSHYNPIMQQPALLTGHVTLPAAQPLNVGVAHVMRQQPTSTTSSRKSKQHQSSVRNVSTCEVSSSQAISSPQRSKRVKENTPPRCAMVHSSPACSTSVTCGWGDVASSTTRERQRQTIVIPDTPSPTVSVITISSDTDEEEEQKHAPTSTVSKQRKNVISCVTVHDSPYSDSSSNTSPYSVQQRAGHNNANAFDTKGSLENHCTGNPRTIIVPPLKTQASEVLVECDSLVPVNTSHHSSSYKSKSSSNVTSTSGHSSGSSSGAITYRQQRPGPHFQQQQPLNLSQAQQHITTDRTGSHRRQQAYITPTMAQAPYSFPHNSPSHGTVHPHLAAAAAAAHLPTQPHLYTYTAPAALGSTGTVAHLVASQGSARHTVQHTAYPASIVHQVPVSMGPRVLPSPTIHPSQYPAQFAHQTYISASPASTVYTGYPLSPAKVNQYPYI

SEQ ID NO: 507 - DNA, 2757 bp, Homo sapiens
atggggcctgtgtgggaaggtatggcctcacatgtgcaagttttctcccctcacacccttcaatcaagtgccttctgtagtgtgaagaaactgaaaatagagccgagttccaactgggacatgactgggtacggctcccacagcaaagtgtatagccagagcaagaacatccccctgtcgcagccagccaccacaaccgtcagcacctccttgccggtcccaaacccaagcctaccttacgagcagaccatcgtcttcccaggaagcaccgggcacatcgtggtcacctcagcaagcagcacttctgtcaccgggcaagtcctcggcggaccacacaacctaatgcgtcgaagcactgtgagcctccttgatacctaccaaaaatgtggactcaagcgtaagagcgaggagatcgagaacacaagcagcgtgcagatcatcgaggagcatccacccatgattcagaataatgcaagcggggccactgtcgccactgccaccacgtctactgccacctccaaaaacagcggctccaacagcgagggcgactatcagctggtgcagcatgaggtgctgtgctccatgaccaacacctacgaggtcttagagttcttgggccgagggacgtttgggcaagtggtcaagtgctggaaacggggcaccaatgagatcgtagccatcaagatcctgaagaaccacccatcctatgcccgacaaggtcagattgaagtgagcatcctggcccggttgagcacggagagtgccgatgactataacttcgtccgggcctacgaatgcttccagcacaagaaccacacgtgcttggtcttcgagatgttggagcagaacctctatgactttctgaagcaaaacaagtttagccccttgcccctcaaatacattcgcccagttctccagcaggtagccacagccctgatgaaactcaaaagcctaggtcttatccacgctgacctcaaaccagaaaacatcatgctggtggatccatctagacaaccatacagagtcaaggtcatcgactttggttcagccagccacgtctccaaggctgtgtgctccacctacttgcagtccagatattacagggcccctgagatcatccttggtttaccattttgtgaggcaattgacatgtggtccctgggctgtgttattgcagaattgttcctgggttggccgttatatccaggagcttcggagtatgatcagattcggtatatttcacaaacacagggtttgcctgctgaatatttattaagcgccgggacaaagacaactaggtttttcaaccgtgacacggactcaccatatcctttgtggagactgaagacaccagatgaccatgaagcagagacagggattaagtcaaaagaagcaagaaagtacattttcaactgtttagatgatatggcccaggtgaacatgacgacagatttggaagggagcgacatgttggtagaaaaggctgaccggcgggagttcattgacctgttgaagaagatgctgaccattgatgctgacaagagaatcactccaatcgaaaccctgaaccatccctttgtcaccatgacacacttactcgattttccccacagcacacacgtcaaatcatgtttccagaacatggagatctgcaagcgtcgggtgaatatgtatgacacggtgaaccagagcaaaacccctttcatcacgcacgtggcccccagcacgtccaccaacctgaccatgacctttaacaaccagctgaccactgtccacaaccaggctccctcctctaccagtgccactatttccttagccaatcccgaagtctccatactaaactacccatctacactctaccagccctcagcggcatccatggctgcagtggcccagcggagcatgcccctgcagacaggaacagcccagatttgtgcccggcctgacccgttccagcaagctctcatcgtgtgtccccccggcttccaaggcttgcaggcctctccctctaagcacgctggctactcggtgcgaatggaaaatgcagttcccatcgtcactcaagccccaggagctcagcctcttcagatccaaccaggtctgcttgcccagcaggcttggccaagtgggacccagcagatcctgcttcccccagcatggcagcaactgactggagtggccacccacacatcagtgcagcatgccaccgtgattcccgagaccatggcaggcacccagcagctggcggactggagaaatacgcatgctcacggaagccattataatcccatcatgcagcagcctgcactattgaccggtcatgtgacccttccagcagcacagcccttaaatgtgggtgtggcccacgtgatgcggcagcagccaaccagcaccacctcctcccggaagagtaagcagcaccagtcatctcaaagaaaaaacgtcatcagctgtgtcacagtccacgactccccctactccgactcctccagcaacaccagcccctactccgtgcagcagcgtgctgggcacaacaatgccaatgcctttgacaccaaggggagcctggagaatcactgcacggggaacccccgaaccatcatcgtgccacccctgaaaacccaggccagcgaagtattggtggagtgtgatagcctggtgccaggtaatttggggccaggacagggcaggaacctctccctggagagtggttttcctgcttttctgctgctagaaatgttgctgtatgggagctag

SEQ ID NO: 508 - protein, 918 aa, Homo sapiens
MGPVWEGMASHVQVFSPHTLQSSAFCSVKKLKIEPSSNWDMTGYGSHSKVYSQSKNIPLSQPATTTVSTSLPVPNPSLPYEQTIVFPGSTGHIVVTSASSTSVTGQVLGGPHNLMRRSTVSLLDTYQKCGLKRKSEEIENTSSVQIIEEHPPMIQNNASGATVATATTSTATSKNSGSNSEGDYQLVQHEVLCSMTNTYEVLEFLGRGTFGQVVKCWKRGTNEIVAIKILKNHPSYARQGQIEVSILARLSTESADDYNFVRAYECFQHKNHTCLVFEMLEQNLYDFLKQNKFSPLPLKYIRPVLQQVATALMKLKSLGLIHADLKPENIMLVDPSRQPYRVKVIDFGSASHVSKAVCSTYLQSRYYRAPEIILGLPFCEAIDMWSLGCVIAELFLGWPLYPGASEYDQIRYISQTQGLPAEYLLSAGTKTTRFFNRDTDSPYPLWRLKTPDDHEAETGIKSKEARKYIFNCLDDMAQVNMTTDLEGSDMLVEKADRREFIDLLKKMLTIDADKRITPIETLNHPFVTMTHLLDFPHSTHVKSCFQNMEICKRRVNMYDTVNQSKTPFITHVAPSTSTNLTMTFNNQLTTVHNQAPSSTSATISLANPEVSILNYPSTLYQPSAASMAAVAQRSMPLQTGTAQICARPDPFQQALIVCPPGFQGLQASPSKHAGYSVRMENAVPIVTQAPGAQPLQIQPGLLAQQAWPSGTQQILLPPAWQQLTGVATHTSVQHATVIPETMAGTQQLADWRNTHAHGSHYNPIMQQPALLTGHVTLPAAQPLNVGVAHVMRQQPTSTTSSRKSKQHQSSQRKNVISCVTVHDSPYSDSSSNTSPYSVQQRAGHNNANAFDTKGSLENHCTGNPRTIIVPPLKTQASEVLVECDSLVPGNLGPGQGRNLSLESGFPAFLLLEMLLYGS

SEQ ID NO: 509 - DNA, 15049 bp, Homo sapiens
ctcaagatggcagattccgactgaggctgggggggccgagctcgcgcgccgctttcccgtccccgttgccatgaaccgcggacaccccggccccgatggcccccgtgtacgaaggtatggcctcacatgtgcaagttttctcccctcacacccttcaatcaagtgccttctgtagtgtgaagaaactgaaaatagagccgagttccaactgggacatgactgggtacggctcccacagcaaagtgtatagccagagcaagaacatccccctgtcgcagccagccaccacaaccgtcagcacctccttgccggtcccaaacccaagcctaccttacgagcagaccatcgtcttcccaggaagcaccgggcacatcgtggtcacctcagcaagcagcacttctgtcaccgggcaagtcctcggcggaccacacaacctaatgcgtcgaagcactgtgagcctccttgatacctaccaaaaatgtggactcaagcgtaagagcgaggagatcgagaacacaagcagcgtgcagatcatcgaggagcatccacccatgattcagaataatgcaagcggggccactgtcgccactgccaccacgtctactgccacctccaaaaacagcggctccaacagcgagggcgactatcagctggtgcagcatgaggtgctgtgctccatgaccaacacctacgaggtcttagagttcttgggccgagggacgtttgggcaagtggtcaagtgctggaaacggggcaccaatgagatcgtagccatcaagatcctgaagaaccacccatcctatgcccgacaaggtcagattgaagtgagcatcctggcccggttgagcacggagagtgccgatgactataacttcgtccgggcctacgaatgcttccagcacaagaaccacacgtgcttggtcttcgagatgttggagcagaacctctatgactttctgaagcaaaacaagtttagccccttgcccctcaaatacattcgcccagttctccagcaggtagccacagccctgatgaaactcaaaagcctaggtcttatccacgctgacctcaaaccagaaaacatcatgctggtggatccatctagacaaccatacagagtcaaggtcatcgactttggttcagccagccacgtctccaaggctgtgtgctccacctacttgcagtccagatattacagggcccctgagatcatccttggtttaccattttgtgaggcaattgacatgtggtccctgggctgtgttattgcagaattgttcctgggttggccgttatatccaggagcttcggagtatgatcagattcggtatatttcacaaacacagggtttgcctgctgaatatttattaagcgccgggacaaagacaactaggtttttcaaccgtgacacggactcaccatatcctttgtggagactgaagacaccagatgaccatgaagcagagacagggattaagtcaaaagaagcaagaaagtacattttcaactgtttagatgatatggcccaggtgaacatgacgacagatttggaagggagcgacatgttggtagaaaaggctgaccggcgggagttcattgacctgttgaagaagatgctgaccattgatgctgacaagagaatcactccaatcgaaaccctgaaccatccctttgtcaccatgacacacttactcgattttccccacagcacacacgtcaaatcatgtttccagaacatggagatctgcaagcgtcgggtgaatatgtatgacacggtgaaccagagcaaaacccctttcatcacgcacgtggcccccagcacgtccaccaacctgaccatgacctttaacaaccagctgaccactgtccacaaccaggctccctcctctaccagtgccactatttccttagccaatcccgaagtctccatactaaactacccatctacactctaccagccctcagcggcatccatggctgcagtggcccagcggagcatgcccctgcagacaggaacagcccagatttgtgcccggcctgacccgttccagcaagctctcatcgtgtgtccccccggcttccaaggcttgcaggcctctccctctaagcacgctggctactcggtgcgaatggaaaatgcagttcccatcgtcactcaagccccaggagctcagcctcttcagatccaaccaggtctgcttgcccagcaggcttggccaagtgggacccagcagatcctgcttcccccagcatggcagcaactgactggagtggccacccacacatcagtgcagcatgccaccgtgattcccgagaccatggcaggcacccagcagctggcggactggagaaatacgcatgctcacggaagccattataatcccatcatgcagcagcctgcactattgaccggtcatgtgacccttccagcagcacagcccttaaatgtgggtgtggcccacgtgatgcggcagcagccaaccagcaccacctcctcccggaagagtaagcagcaccagtcatctgtgagaaatgtctccacctgtgaggtgtcctcctctcaggccatcagctccccacagcgatccaagcgtgtcaaggagaacacacctccccgctgtgccatggtgcacagtagcccggcctgcagcacctcggtcacctgtgggtggggcgacgtggcctccagcaccacccgggaacggcagcggcagacaattgtcattcccgacactcccagccccacggtcagcgtcatcaccatcagcagtgacacggacgaggaggaggaacagaaacacgcccccaccagcactgtctccaagcaaagaaaaaacgtcatcagctgtgtcacagtccacgactccccctactccgactcctccagcaacaccagcccctactccgtgcagcagcgtgctgggcacaacaatgccaatgcctttgacaccaaggggagcctggagaatcactgcacggggaacccccgaaccatcatcgtgccacccctgaaaacccaggccagcgaagtattggtggagtgtgatagcctggtgccagtcaacaccagtcaccactcgtcctcctacaagtccaagtcctccagcaacgtgacctccaccagcggtcactcttcagggagctcatctggagccatcacctaccggcagcagcggccgggcccccacttccagcagcagcagccactcaatctcagccaggctcagcagcacatcaccacggaccgcactgggagccaccgaaggcagcaggcctacatcactcccaccatggcccaggctccgtactccttcccgcacaacagccccagccacggcactgtgcacccgcatctggctgcagccgctgccgctgcccacctccccacccagccccacctctacacctacactgcgccggcggccctgggctccaccggcaccgtggcccacctggtggcctcgcaaggctctgcgcgccacaccgtgcagcacactgcctacccagccagcatcgtccaccaggtccccgtgagcatgggcccccgggtcctgccctcgcccaccatccacccgagtcagtatccagcccaatttgcccaccagacctacatcagcgcctcgccagcctccaccgtctacactggatacccactgagccccgccaaggtcaaccagtacccttacatataaacactggaggggagggagggagggagggagggagagaatggcccgagggaggagggagagaaggagggaggcgctcctgggaccgtgggcgctggccttttatactgaagatgccgcacacaaacaatgcaaacggggcaggggcgggggggggggggggggcagagggcagggggacgggtcgggacaccagtgaaacttgaaccgggaagtgggaggacgtagagcagagaagagaacatttttaaaaggaagggattaaagagggtgggaaatctatggtttttattttaaaaaagaaaaaggaaaaaaaaaaagtcaataacaaaaaacccagctcaagaacccattctacgccaaactggaaaggagaagagagcaacaggaagattccagaaacggggggccccagtttttgaagaactttatgaacttttcaaagattattttcatatggcagcaagtgatacggaagactgctgtcagggacacctgatatggaaatcaaatagatttttaattaattgaacataagatttagggatttttccagaactcgaaagggtcaacagccctccagaatgtcgggctgcagcctgaggaggctgatgtttggagctggtgtgggattggcgaagcccagtccgggctccctagtcaggaaagacgggggacggccaggctgctggaaggcccccgggggcgcggggcgagttttctttttctgagcactctggataaatccctaagcaacgttgtttctcaaatgtcattaataatgtgtgttgcaaactttaggtttttttcttttctgaaaatgtattttctctttgaatccacccctagtcgcgtagcgtagggctagcggtcgtcacagacaccctagtagaatgtagcactcagcacccttgtctcctaccttgtgttcaactccaatgataccaatagaatattcctcaatgtaattgcacaaaaaaaagcgatataacataggcatgtaaccaatgtggcggtgcaggtgtgcgggtgagcgagcacgtgtgggtgtgcacgcgccgccctccccgcgtggccctcggcgccgccaccctagctggcgcagtcttgacactgcatccttccctcctagtgccttaccgagcgacagacgcggcgtgagggtttacttccactggtactccaagaaactgaggctagtcagacacaatctcagctcttctgttgtgctgttgtaacagtttacgctggccttttttttttctttttctttttctttttaaaatgttaatgcccgttgtctttcctgggctgtttgctagcggaaggatgccagggaagccagcaggagctaggagagagtccgtggatctcgaaagaaatatgggagacagatgcccggcgggtgcgtctggagatggggacggcgggagttgagttgtggcagtagttgagttgtaatttgtgggcggaggcccagagagactccccacccttcacccctgccccactctgtccccagttccgccatttgtgaggccagaggtttccggactgttggcctcgccaggcagccgtctcccgccccaggcggcatcccccagtccctcccgcctccacgagagcctggagctctcagcctcgcccggggctccactctctcctccggctccctgggctgttttgctctaacgatcttgccagatccctccctctgtagacaaccaccaacctctgtttgctgttgaattctctcctcacattacccaggtctgctcaagacatgattttggttttggtttctgagggttctagtgggcagaaggttggagggacacttatgagggtggccgggggtctgacgctgcactttggaaaaactcacacagttgaatttccaaagaaatctgccctttgccctctttgcacctttgatacattctggaagttttctcaggctttggacacttctggggatggaggtgtggagaagtggggagttccctctcttcatagtaaataactctgaaatatgtgaatgtgaatggcaggagaatctggccaaggatggggccgaaaagggtggttctaattgtttgcttctgatgttgagtctttagctgaccccacaggcaggtttccaaggtgcaaagagatctttcccgagtcagcggccccatcctcatcctccctccctttacttcctcactgtgcagtctccctcaaggatctactgtgaaaggtgtgtttgtagtgatatccaacctaactcagtaacgaagtcgttacttagctcttagctgtgaaataactctggaaacttccccaccccaaccataaattcttacttataaagaaacaggtccccaaactggaaacagcttagtccaggcctcagcgagaaggaaggacaccatgactgctccatgctgggcacagccgggcagtcttgccaagtgcctgctggaggctgtgccggcaagaggcctgcagcaaggagattcccttccctcgggccattatcaatactgtctttatctggaggtggggaagcgcagccctctgagacagcaggacaatggtcagttcagagagggtgagggcagcaaacgcttcagaggacacagaagccagaggacccccccccgccccacagctgggtcagcctggaaaatccatctattagggactttttggcagccagatggcagcaatagcccattaggtctcatcccgagttccaagtcttggctgcaaatgagcctcagttcgccttactggagagcacccccagattcctgggcacagttcatttccagccctttctagatctgatcttttagggggaaagacagcttaaaatgttcttttcattttaaagaaaattattctgtctgcttaagttggaggctacttactctttcacctgacattttctttccttttattcttccagatcaggaatgaaatttccatgctgctcataaagataatattattgtactaattatttttattaccattgtaattatgatcattatgttgatattttagtcagggttttaaatgcacatttattccaagtatctttgtgttttctctttaatatttaaacttattctctctgtgagtatataagtagactggagggacatccagatgtccagttttgtcaggcaaaaaaaaaaaggaaagacttaggaagtaggaaaattgtttctgtcatctctatcccaacaagagacgtcaagaaagatccaccacagaacaaaagtttaaagaagaatcaaagccttgattgggcttctgacaacatggtcaccatcaaggttgtcattttctagatcccagaggcctgggatgcgacgtcaggtggcatctcatgggctcggggaatgtcgagtcactgactgtccagcccttagccagcttctctcccacatcctcagagctctcctgtgcttctgaaatctgttaactaaatctttggcttgcctctggtatttaagcaagaaaattccctcccagaggtgaccccatccgcttccccacaatccatccttttgccatcggcgcacctggggcgtggcttaggttcttcaatgcagggacatttgccccctcccagaagctgctgggcacagtgaggtggcgtaagagtgactggcaggtggtaccttccccaggaaatttcaccacaccacccagttcctcagcctgccccctccccctgtgatgcatgcccccagcacccaattctagccagctggaagtgggtggagggacagcaggaggccagagaaaccctgaacaaagctgggcggctgctcaggcatcacaggctgcaccccctctgaaagcatccccactgggctccggccacatcttcagtgcactgtgctgtgtgcgctgggtgctcacacgctgtccccagacccacaaagtgctaggccccagttgaagaaaggggtgaaatagccagcttcaccgaagggaagggaagggaagtattgggcgatgccagccccacagacgctcagcaaacattagtgcacattctcctagtcctcacccaatggcctcctctacccccatgcatggagctgccacatcagaagccccaagagaagctccctgcaggagaggccagctccctggatgcccaattgcatacctggccgaatctgccattgagtcaccttagcaaataggctgctgtcactaggaccaagctctcaagcagagggatgccaacctagtccttacttagcccacgaatcatctagagcatcctctagtcttttgtgggctccctccttcccatttgaagagacattgttcagaggaagaggggaagatttgaaatgtcaggtcacggaggagtgtttaactggagcctggtgaaccgcagggcaatttgcttctgctcactgggttctgactggcccgtctggacgtgggcccccatgtctctgtgcttagggcctcttcatgatgttttggatgtttccaagggaagtgggtgagcagatcaaggggtgggagagtcgaggcttgatgccagttaatactgtgaagtggagcgtgcggtcagtggaattcagaggaaaaagaagggttggagcaaagcggcattcatctcctggactgttagcctttctagtcttcctggtggctgaggtgttcacgggctgggggagccagctgacctttgtcctcttcaacctagaagactcagcccgcccagacaccaacgtgtgagacggatggacatcaggaagggaaggggagattagcccaactgctgacagaacgatttcccttggttggaccttgggaatggcaaacactcatattggaacaagcttggggtggaagatttaggccgtgtgagcatgtgtgagtgagtggaacaaactttcttggaaactggagggaggagatgaggaggcttcgggaagtattactgatggctcatggttgagagagcgacgtggggacccagctcgccccagcttttgtcccaggttctctttgtctgatgctgagggcagggtggggtgtgggaccaccactcttgttggcctgtcaagtagaccctaggacagaaaatggaaagaaggaaatggctcggtgctctcaactagcagagagaattgaggagaggtaagggttccttctgcaggccagcctgggactccacagcgccagcaggagtgacttggccacaagacattccagccccagggactttgcaggcttcattccctgtctgtgtcttttccttctggtgtgttttacagacttctgatggggaagcttcaaacttgagcaggccagagatgtccttaccaaattggaaaggaaggtgaaactgttcctttctttagccaaagaacccttctcaaagacgcctccagaaatggacaaaatggccttcccttcgttcctttccaggcaataatgacatcattagtgatgcaattctatttgtctttctctttcctctctgtccttttttttaaaaaaaaaaaatgcatttatttcaaaactgtgctattcttttaagaggagtggaggtgaccccttcgatgctgctgctatcgggagacaaggtgccataccaatacgtgggcttgactaatcccaggccaccatgggagagagcaaagcagggctgccaggagttcagttgcatcaagggcgtagagcacgcgggggctgggctcggaatagcagtacttttccactttgatgccttagaactctcacttctcatctccacagaccagactcagtaaaatctcaggccactagagaatggaaggcggtgaaacaggatttaaatgcaaaaaaaacctattggaggcttttggcaccgtggctcactagagggacccagcatagtagaggtttctcttgttgcagcttctgaaaagttcaaaaaagaactccaggccgttcttccctcaaacccagtgagagtttgcagagaagtgccccctgcagggctcccgtcccagaacaccagcaccagagagggtcttcccgatgccccccgctggacttgcccaagcctctgggagcccctcatctcagatccctgtgttgaacatgacactgactgtcccttatttgttaaaatttgcaatatctctcaagtaaataatagccaacatttgttgaatgctttcatgactcccgggctaaggcctttatgagcgttgtctcaaggggccccaacagccatcccacagggagggggataacagcccccatttatagataagggagctgaccggatgctctgagaagtggcaggtgttgaaggaaggataaagcagtgatgggccagaatccccaaggttcccttttttgttcatcaggcccttcctgagatgtgatttttaatcttttaactttttttaattaatagcaatgcgtggcctcatatttctatgaaccatttagtgatactcccgcttcctgcatgccacacactgtgctgggaattgctcatgggttgtcctgtttcatcttctccgtagccctgtgagatcggcaatattagtccccctacagccaaggaaactgcccagagccacacaactcttgaggggcgaggagggcttgaacctgagtctgcccagctccagaactgagcttgcagccattagccacagctgtctcctgcatgtctgagcaaagaaaggcctttacacagcatcaccctgtgccatcccatgcaccgtgggactcagctaaaggactgtgcaaagagggggctcctgagttggatttaggcaaaaggggcagaattcgtttgatttttagagaaaatctctggagagtttcttttgattcatagaattccttttagatttctttccagcataccaactagctttagtagtgctgctacaaccagctcttataagtaagagtgaaaaagtattcttttcttctttaaaaaataagtttttcttgcttatagttaattctagaaaggcaatactaaaggtatatatttttttcaaaatgctattttttactgcacttgataattatcctgacagctctgatctctgtaatagattcactcttcagctctgggcagaaccagaggcagggttcacaccaaatttgtaaataccatatgtgggtctggtgtccaggaacttttttctttctgttaaaaaaaagaaaaaaaaaagaaaaaaaaaaagaagtagaggtggaagaaagacaagacttagaggaacaaaagaatgttttcttttgagatactcttctcaaagaaatagcaacaattgtataaacaggaaaaccagccagctttcatgataaaaggaaggcgtgtctcttgccctggtatgagattaacagaaatacagatgcatttttattttgattgaaagatggtgagaatgtagaaatgcttaggactagatttttaattttttaaaataactattatcatttattatgaaatatttgttcagttgttttgagtgggtttcttgttccttttttcatttaaaaccttctttgttgactggctccaggcttgtttgcctaaattcttaggtagtttacacaagttctagaatcttttagaactttaactccattggaagcaaacctaactaatcggagtttgagatcctggttggtttcaataggtattctggaattctggcagaacacctaaagattttttttttttttagaaggttttagatacattatcttacacaaactgtgacctaatggcaataattacctcaaatgtgggcattcatcctggttttagccttttttgaaatcatgtagccagcttgatcttggaatttaaagactatgaattctctgtgggctgaaaataatgattacttcatacccccggtcatcgttgcttaagtgaattctgaaaatagctcatctttacaacaaaaattaaaccaaggaagagattattctttgtgtgttgtactcaaatgcgatgttcaaatgcacatgttaagtatatatgtttttagctactgtaaaatgctgttagccttctaagctatcaaaacagtcacattttaaatgagtaaactaaacaattgactgtggatacttaagcatatttctggctacgttttatagttaaagtgttttatagtttacatttagactggtactttttaaagaaaagttctgtttataactgacatccgcaaaccccagtgaatgcctcttagttggaggttgtgtctcccccaaggcaagtgtgttgtcccagactcttctgtagtccagcatgcgcacttccctctggattattactttccacgtgaactcaagagaacatgaaaggcaatccagatggagggaaaaggtgtgagtccgcagcccgggccagatgcgaaggtctcatgcgtgtcgtctaaacacttgtcttcaaggccttctctctgacatcttggaagagtcattgagaacagataacctggttcattgatttttgtcttgatttgaatatttaacttattaatagatccactgatttccaggcaccaggcagtagaagagactgggattcaggtgaccatgaaggcacagctgctacttctgggccgggggtgatattttgatcagcgttttgtaggggaggaccatatacccctattcccatggtcgctggctgggttttccatatatctgctgtcatttattcgttttccccttaaaagcaaaatcaatgtaaaaggctatgtttacgttttactcattgtccagcttagactcaaagtctagttcggtgggagggggaccttagcatcctctcagagatggtcagggctgagcaggaggaggcagagacagaggggcagctcagcctggtccattgagacccactctaaacagacatcatatttggaacaagaagatgcttcgagacaggaatgggccccactgtcatgcagaaacagactgggggaatggcagtttccctgagtcttggtttcttttatgttttctcttgtgccaccaccaaactgcagaggacctgctgtgacctaaagggcattcctttagcagataagaccttgaaaactgcaaaacacctgggaccagggagcttttaaaaaatacaaaaaaataccacatttgctttttccctgtgaactgtattgacagcgtgttcttaggacagtcttttggtggaaatgttactgtaaaatagttttcatctcacccctcctaatcatactcccactttcctgtttgtgtggtggtgttgctgttttttcctttacatgaattaaccaaatgaattttgtgtcattgtttttggggcttatatttttaaaacatagaaattgccttttgttcatttgaaaagtaagtatgttgtatctgaaaaagggctctgcctctgctctccctcgcttccttgtaaccaatctccaaacgaatctctcctggcaccgcccccttccttatatagggtcactgtccccggggccacctctgcctccaccctgctgtcaccactgccctgggccaaggcacccaggactcccagaaagcgcgagagccagcaagaaggccccactcagccttgagactggtggtcacacctccctgtcagagtcgcctgctgggctgaaggggcaatggattgtcattgttgaaattgtttggctcaggttataaggaggaacttgggaagtagaaagtgacttgaccatgtgcatccttggtagcttcctgtaactaacaaatggaacagagagcacacccccgccccgccccaccccaagcagatgttcccgtcagcgctgccctgagtcagtcggtcccccgtttctgctctcctcccttttgtgttcctgctcacttcaagcttcttccatggactttccagggcacagtcatctctagcccccaaatcatctcttcatcctctgtgtgtgcatttttttaaccaaatgaaatagacaagaaagtcatactttggggcagcagaatttctaatttagtagaatcactgtatagagatagatgttgatatatatgtttgtgtatatatatcaaaccaaattggataggagaagtatagctttacagatgaggagaaggagctctttagaggtcggagtcaagactggtgtcttggacgtgcatgggctgtgtcccaggccactccgcacacatggggctgaggcgtggcgccgggcccttgtcatccacctcaccacggcagagccagcaggccctgtagggtgctgctgctgtctcactgggtcccagcttcaagcgcatcagtgggtgacgggggcaacaaatcagagtgactggaagtttccatcccgttttgctttgaccacgtgtactgagctgcagcctctgatactctgtcacgtttccaaaaatggtatccattaggatagaaagagaatggatctgcagaaatgtttacctttcaactgctcatgaattcaggacactggatagaaagactcactccccaaaatgagaacagggaagaggagacccggcgacactaagtcaccaggtccaaggaacgtggctccctccccagggtcatctcacctagatctttctctcccaggtcatctcagctcaatctcaataaccctatgaaagccctggtctgttgtgttccttcaccgtacggtttctgtaataaaaagtgttaatccatgttaatctgtgtgaaaattattgcgtgcaacagtattttctcgtgtacctctttttcctatgtgaattgtccctcttttttatttataaatgtctacttttgtttttttaaagacaaaccaatgtgttgtagacctatatgtaacctattccttagtctcatattataggtatgttataagaatggatattttacttggctttagaatgttttacaagaaaactaattcttaactgatcaagtccttgctactaaaatgcttgtgtttttcatcatgacgtcgtgtgcttctaaattaatcattttcgttgtagaaaaatggagtgaatttatattagtcttggaaactaataatagcattgtaaatttatgagatgattttaacagaaaaaatatagaagaatatagttattttaattgtaatattactaactgtagggtgagaaaaaggggggggggtcccattgtggtgaactatgttatagcttgttactcatagtttctttttgatcattttttcggtctccgaggtgaaatgacttattaattaaaatttgtaaactcacatatgcatattgtatatgtgtagaaatgtaatcacactttgtcttggaattacattaaactgtttgaaatcactgta

SEQ ID NO: 510 - protein, 1198 aa, Homo sapiens
MAPVYEGMASHVQVFSPHTLQSSAFCSVKKLKIEPSSNWDMTGYGSHSKVYSQSKNIPLSQPATTTVSTSLPVPNPSLPYEQTIVFPGSTGHIVVTSASSTSVTGQVLGGPHNLMRRSTVSLLDTYQKCGLKRKSEEIENTSSVQIIEEHPPMIQNNASGATVATATTSTATSKNSGSNSEGDYQLVQHEVLCSMTNTYEVLEFLGRGTFGQVVKCWKRGTNEIVAIKILKNHPSYARQGQIEVSILARLSTESADDYNFVRAYECFQHKNHTCLVFEMLEQNLYDFLKQNKFSPLPLKYIRPVLQQVATALMKLKSLGLIHADLKPENIMLVDPSRQPYRVKVIDFGSASHVSKAVCSTYLQSRYYRAPEIILGLPFCEAIDMWSLGCVIAELFLGWPLYPGASEYDQIRYISQTQGLPAEYLLSAGTKTTRFFNRDTDSPYPLWRLKTPDDHEAETGIKSKEARKYIFNCLDDMAQVNMTTDLEGSDMLVEKADRREFIDLLKKMLTIDADKRITPIETLNHPFVTMTHLLDFPHSTHVKSCFQNMEICKRRVNMYDTVNQSKTPFITHVAPSTSTNLTMTFNNQLTTVHNQAPSSTSATISLANPEVSILNYPSTLYQPSAASMAAVAQRSMPLQTGTAQICARPDPFQQALIVCPPGFQGLQASPSKHAGYSVRMENAVPIVTQAPGAQPLQIQPGLLAQQAWPSGTQQILLPPAWQQLTGVATHTSVQHATVIPETMAGTQQLADWRNTHAHGSHYNPIMQQPALLTGHVTLPAAQPLNVGVAHVMRQQPTSTTSSRKSKQHQSSVRNVSTCEVSSSQAISSPQRSKRVKENTPPRCAMVHSSPACSTSVTCGWGDVASSTTRERQRQTIVIPDTPSPTVSVITISSDTDEEEEQKHAPTSTVSKQRKNVISCVTVHDSPYSDSSSNTSPYSVQQRAGHNNANAFDTKGSLENHCTGNPRTIIVPPLKTQASEVLVECDSLVPVNTSHHSSSYKSKSSSNVTSTSGHSSGSSSGAITYRQQRPGPHFQQQQPLNLSQAQQHITTDRTGSHRRQQAYITPTMAQAPYSFPHNSPSHGTVHPHLAAAAAAAHLPTQPHLYTYTAPAALGSTGTVAHLVASQGSARHTVQHTAYPASIVHQVPVSMGPRVLPSPTIHPSQYPAQFAHQTYISASPASTVYTGYPLSPAKVNQYPYI

SEQ ID NO: 511 - DNA, 3969 bp, Homo sapiens
cacgggaggcggtgatgcgggcgcgggcggcctcggctgcgccgagagcggagacacaggctcaagatggcagattccgactgaggctgggggggccgagctcgcgcgccgctttcccgtccccgttgccatgaaccgcggacaccccggccccgatggcccccgtgtacgaaggtatggcctcacatgtgcaagttttctcccctcacacccttcaatcaagtgccttctgtagtgtgaagaaactgaaaatagagccgagttccaactgggacatgactgggtacggctcccacagcaaagtgtatagccagagcaagaacatccccctgtcgcagccagccaccacaaccgtcagcacctccttgccggtcccaaacccaagcctaccttacgagcagaccatcgtcttcccaggaagcaccgggcacatcgtggtcacctcagcaagcagcacttctgtcaccgggcaagtcctcggcggaccacacaacctaatgcgtcgaagcactgtgagcctccttgatacctaccaaaaatgtggactcaagcgtaagagcgaggagatcgagaacacaagcagcgtgcagatcatcgaggagcatccacccatgattcagaataatgcaagcggggccactgtcgccactgccaccacgtctactgccacctccaaaaacagcggctccaacagcgagggcgactatcagctggtgcagcatgaggtgctgtgctccatgaccaacacctacgaggtcttagagttcttgggccgagggacgtttgggcaagtggtcaagtgctggaaacggggcaccaatgagatcgtagccatcaagatcctgaagaaccacccatcctatgcccgacaaggtcagattgaagtgagcatcctggcccggttgagcacggagagtgccgatgactataacttcgtccgggcctacgaatgcttccagcacaagaaccacacgtgcttggtcttcgagatgttggagcagaacctctatgactttctgaagcaaaacaagtttagccccttgcccctcaaatacattcgcccagttctccagcaggtagccacagccctgatgaaactcaaaagcctaggtcttatccacgctgacctcaaaccagaaaacatcatgctggtggatccatctagacaaccatacagagtcaaggtcatcgactttggttcagccagccacgtctccaaggctgtgtgctccacctacttgcagtccagatattacagggcccctgagatcatccttggtttaccattttgtgaggcaattgacatgtggtccctgggctgtgttattgcagaattgttcctgggttggccgttatatccaggagcttcggagtatgatcagattcggtatatttcacaaacacagggtttgcctgctgaatatttattaagcgccgggacaaagacaactaggtttttcaaccgtgacacggactcaccatatcctttgtggagactgaagacaccagatgaccatgaagcagagacagggattaagtcaaaagaagcaagaaagtacattttcaactgtttagatgatatggcccaggtgaacatgacgacagatttggaagggagcgacatgttggtagaaaaggctgaccggcgggagttcattgacctgttgaagaagatgctgaccattgatgctgacaagagaatcactccaatcgaaaccctgaaccatccctttgtcaccatgacacacttactcgattttccccacagcacacacgtcaaatcatgtttccagaacatggagatctgcaagcgtcgggtgaatatgtatgacacggtgaaccagagcaaaacccctttcatcacgcacgtggcccccagcacgtccaccaacctgaccatgacctttaacaaccagctgaccactgtccacaaccagccctcagcggcatccatggctgcagtggcccagcggagcatgcccctgcagacaggaacagcccagatttgtgcccggcctgacccgttccagcaagctctcatcgtgtgtccccccggcttccaaggcttgcaggcctctccctctaagcacgctggctactcggtgcgaatggaaaatgcagttcccatcgtcactcaagccccaggagctcagcctcttcagatccaaccaggtctgcttgcccagcaggcttggccaagtgggacccagcagatcctgcttcccccagcatggcagcaactgactggagtggccacccacacatcagtgcagcatgccaccgtgattcccgagaccatggcaggcacccagcagctggcggactggagaaatacgcatgctcacggaagccattataatcccatcatgcagcagcctgcactattgaccggtcatgtgacccttccagcagcacagcccttaaatgtgggtgtggcccacgtgatgcggcagcagccaaccagcaccacctcctcccggaagagtaagcagcaccagtcatctgtgagaaatgtctccacctgtgaggtgtcctcctctcaggccatcagctccccacagcgatccaagcgtgtcaaggagaacacacctccccgctgtgccatggtgcacagtagcccggcctgcagcacctcggtcacctgtgggtggggcgacgtggcctccagcaccacccgggaacggcagcggcagacaattgtcattcccgacactcccagccccacggtcagcgtcatcaccatcagcagtgacacggacgaggaggaggaacagaaacacgcccccaccagcactgtctccaagcaaagaaaaaacgtcatcagctgtgtcacagtccacgactccccctactccgactcctccagcaacaccagcccctactccgtgcagcagcgtgctgggcacaacaatgccaatgcctttgacaccaaggggagcctggagaatcactgcacggggaacccccgaaccatcatcgtgccacccctgaaaacccaggccagcgaagtattggtggagtgtgatagcctggtgccagtcaacaccagtcaccactcgtcctcctacaagtccaagtcctccagcaacgtgacctccaccagcggtcactcttcagggagctcatctggagccatcacctaccggcagcagcggccgggcccccacttccagcagcagcagccactcaatctcagccaggctcagcagcacatcaccacggaccgcactgggagccaccgaaggcagcaggcctacatcactcccaccatggcccaggctccgtactccttcccgcacaacagccccagccacggcactgtgcacccgcatctggctgcagccgctgccgctgcccacctccccacccagccccacctctacacctacactgcgccggcggccctgggctccaccggcaccgtggcccacctggtggcctcgcaaggctctgcgcgccacaccgtgcagcacactgcctacccagccagcatcgtccaccaggtccccgtgagcatgggcccccgggtcctgccctcgcccaccatccacccgagtcagtatccagcccaatttgcccaccagacctacatcagcgcctcgccagcctccaccgtctacactggatacccactgagccccgccaaggtcaaccagtacccttacatataaacactggaggggagggagggagggagggagggagagaatggcccgagggaggagggagagaaggagggaggcgctcctgggaccgtgggcgctggccttttatactgaagatgccgcacacaaacaatgcaaacggggcaggggcgggggggggggggggggcagagggcagggggacgggtcgggacaccagtgaaacttgaaccgggaagtgggaggacgtagagcagagaagagaacatttttaaaaggaagggattaaagagggtgggaaatctatggtttttattttaaaaaa

SEQ ID NO: 512 - protein, 1171 aa, Homo sapiens
MAPVYEGMASHVQVFSPHTLQSSAFCSVKKLKIEPSSNWDMTGYGSHSKVYSQSKNIPLSQPATTTVSTSLPVPNPSLPYEQTIVFPGSTGHIVVTSASSTSVTGQVLGGPHNLMRRSTVSLLDTYQKCGLKRKSEEIENTSSVQIIEEHPPMIQNNASGATVATATTSTATSKNSGSNSEGDYQLVQHEVLCSMTNTYEVLEFLGRGTFGQVVKCWKRGTNEIVAIKILKNHPSYARQGQIEVSILARLSTESADDYNFVRAYECFQHKNHTCLVFEMLEQNLYDFLKQNKFSPLPLKYIRPVLQQVATALMKLKSLGLIHADLKPENIMLVDPSRQPYRVKVIDFGSASHVSKAVCSTYLQSRYYRAPEIILGLPFCEAIDMWSLGCVIAELFLGWPLYPGASEYDQIRYISQTQGLPAEYLLSAGTKTTRFFNRDTDSPYPLWRLKTPDDHEAETGIKSKEARKYIFNCLDDMAQVNMTTDLEGSDMLVEKADRREFIDLLKKMLTIDADKRITPIETLNHPFVTMTHLLDFPHSTHVKSCFQNMEICKRRVNMYDTVNQSKTPFITHVAPSTSTNLTMTFNNQLTTVHNQPSAASMAAVAQRSMPLQTGTAQICARPDPFQQALIVCPPGFQGLQASPSKHAGYSVRMENAVPIVTQAPGAQPLQIQPGLLAQQAWPSGTQQILLPPAWQQLTGVATHTSVQHATVIPETMAGTQQLADWRNTHAHGSHYNPIMQQPALLTGHVTLPAAQPLNVGVAHVMRQQPTSTTSSRKSKQHQSSVRNVSTCEVSSSQAISSPQRSKRVKENTPPRCAMVHSSPACSTSVTCGWGDVASSTTRERQRQTIVIPDTPSPTVSVITISSDTDEEEEQKHAPTSTVSKQRKNVISCVTVHDSPYSDSSSNTSPYSVQQRAGHNNANAFDTKGSLENHCTGNPRTIIVPPLKTQASEVLVECDSLVPVNTSHHSSSYKSKSSSNVTSTSGHSSGSSSGAITYRQQRPGPHFQQQQPLNLSQAQQHITTDRTGSHRRQQAYITPTMAQAPYSFPHNSPSHGTVHPHLAAAAAAAHLPTQPHLYTYTAPAALGSTGTVAHLVASQGSARHTVQHTAYPASIVHQVPVSMGPRVLPSPTIHPSQYPAQFAHQTYISASPASTVYTGYPLSPAKVNQYPYI

SEQ ID NO: 513 - DNA, 735 bp, Homo sapiens
atgggccccccctcagccgctccccgtggagggcacaggccctggcaggggctcctgatcacagcctcacttttaaccttctggcacccgcccaccactgtccagttcactattgaagccctgccgtccagtgctgcagagggaaaggatgttcttctactggcctgcaatatttcagaaactattcaagcctattattggcacaaggggaaaacggcagaagggagccctctcattgctggttatataacagacattcaagcaaatatcccaggggccgcatacagtggtcgagagacagtataccccaatggatccctgctgttccaaaacatcaccctggaggacgcaggatcctacaccctacgaaccataaatgccagttacgactctgaccaagcaactggccagctccacgtacaccaaaacaacgtcccaggccttcctgtgggggccgtcgctggcatcgtgactggggtcctggttggggtggctctggtggccgccctggtgtgttttctgcttctctccaggactggaagggccagcatccagcgtgacctcagggagcagccgcccccagcctccacccctggccatggtccctctcacagatccaccttctcggcccctctacccagccccagaacagccactcccatctatgaggaattgctatactctgatgcaaacatttactgccagatcgaccacaaagcagatgtggtctcttag

SEQ ID NO: 514 - protein, 244 aa, Homo sapiens
MGPPSAAPRGGHRPWQGLLITASLLTFWHPPTTVQFTIEALPSSAAEGKDVLLLACNISETIQAYYWHKGKTAEGSPLIAGYITDIQANIPGAAYSGRETVYPNGSLLFQNITLEDAGSYTLRTINASYDSDQATGQLHVHQNNVPGLPVGAVAGIVTGVLVGVALVAALVCFLLLSRTGRASIQRDLREQPPPASTPGHGPSHRSTFSAPLPSPRTATPIYEELLYSDANIYCQIDHKADVVS

SEQ ID NO: 515 - DNA, 765 bp, Homo sapiens
atgggccccccctcagccgctccccgtggagggcacaggccctggcaggggctcctgatcacagcctcacttttaaccttctggcacccgcccaccactgtccagttcactattgaagccctgccgtccagtgctgcagagggaaaggatgttcttctactggcctgcaatatttcagaaactattcaagcctattattggcacaaggggaaaacggcagaagggagccctctcattgctggttatataacagacattcaagcaaatatcccaggggccgcatacagtggtcgagagacagtataccccaatggatccctgctgttccaaaacatcaccctggaggacgcaggatcctacaccctacgaaccataaatgccagttacgactctgaccaagcaactggccagctccacgtacaccaaaacaacgtcccaggccttcctgtgggggccgtcgctggcatcgtgactggggtcctggttggggtggctctggtggccgccctggtgtgttttctgcttctctccaggactggaagcatccagcgtgacctcagggagcagccgcccccagcctccacccctggccatggtccctctcacagatccaccttctcggcccctctacccagccccagaacagccactcccatctatgaggtgagtgtgggccatggatgttctggtcccgcaggctccaggggacccaggatctgcccccaccagcacctggctgagctcagattcaggaaaatgcagtga

SEQ ID NO: 516 - protein, 254 aa, Homo sapiens
MGPPSAAPRGGHRPWQGLLITASLLTFWHPPTTVQFTIEALPSSAAEGKDVLLLACNISETIQAYYWHKGKTAEGSPLIAGYITDIQANIPGAAYSGRETVYPNGSLLFQNITLEDAGSYTLRTINASYDSDQATGQLHVHQNNVPGLPVGAVAGIVTGVLVGVALVAALVCFLLLSRTGSIQRDLREQPPPASTPGHGPSHRSTFSAPLPSPRTATPIYEVSVGHGCSGPAGSRGPRICPHQHLAELRFRKMQ

SEQ ID NO: 517 - DNA, 25 bp, Artificial
  Primer
cgcactcttctgagacctggcagat

SEQ ID NO: 518 - DNA, 25 bp, Artificial
  Primer
tccgcactcttctgagacctggcag

SEQ ID NO: 519 - DNA, 25 bp, Artificial
  Primer
tctccgcactcttctgagacctggc

SEQ ID NO: 520 - DNA, 25 bp, Artificial
  Primer
ctctccgcactcttctgagacctgg

SEQ ID NO: 521 - DNA, 25 bp, Artificial
  Primer
gcccaaatgcgtggggttggacttc

SEQ ID NO: 522 - DNA, 25 bp, Artificial
  Primer
ggctgagcccaaatgcgtggggttg

SEQ ID NO: 523 - DNA, 25 bp, Artificial
  Primer
aggcctccatgtccaaggctgagcc

SEQ ID NO: 524 - DNA, 25 bp, Artificial
  Primer
tcaggcctccatgtccaaggctgag

SEQ ID NO: 525 - DNA, 25 bp, Artificial
  Primer
gctgaagtcctttagccggctgaga

SEQ ID NO: 526 - DNA, 25 bp, Artificial
  Primer
ctgaagtcctttagccggctgagac

SEQ ID NO: 527 - DNA, 25 bp, Artificial
  Primer
tgaagtcctttagccggctgagacg

SEQ ID NO: 528 - DNA, 25 bp, Artificial
  Primer
ctcttcggagctcttctggccacag

SEQ ID NO: 529 - DNA, 25 bp, Artificial
  Primer
tctcttcggagctcttctggccaca

SEQ ID NO: 530 - DNA, 25 bp, Artificial
  Primer
gtctcttcggagctcttctggccac

SEQ ID NO: 531 - DNA, 25 bp, Artificial
  Primer
tgtctcttcggagctcttctggcca

SEQ ID NO: 532 - DNA, 25 bp, Artificial
  Primer
catgttgactcctccagactggtac

SEQ ID NO: 533 - DNA, 25 bp, Artificial
  Primer
gactcctccagactggtacacagag

SEQ ID NO: 534 - DNA, 25 bp, Artificial
  Primer
gccgatggtggtgccgtggaaggac

SEQ ID NO: 535 - DNA, 25 bp, Artificial
  Primer
ggtggtgccgtggaaggacatgccc

SEQ ID NO: 536 - DNA, 25 bp, Artificial
  Primer
cttatcaacatagttggcgatctct

SEQ ID NO: 537 - DNA, 25 bp, Artificial
  Primer
tatcaacatagttggcgatctctat

SEQ ID NO: 538 - DNA, 25 bp, Artificial
  Primer
cttgtgtttggtggcgtcctggtct

SEQ ID NO: 539 - DNA, 25 bp, Artificial
  Primer
tggcgtcctggtctcgtcgattctt

SEQ ID NO: 540 - DNA, 25 bp, Artificial
  Primer
cagccagaagcaataaggcctgaga

SEQ ID NO: 541 - DNA, 25 bp, Artificial
  Primer
gatgaaaagtgacacaccatggagt

SEQ ID NO: 542 - DNA, 25 bp, Artificial
  Primer
agtacggcggtgtccaatcagggaa

SEQ ID NO: 543 - DNA, 25 bp, Artificial
  Primer
tattatggttcacatgggtggaggc

SEQ ID NO: 544 - DNA, 25 bp, Artificial
  Primer
aggaaatgaaggagcaagtaacagc

SEQ ID NO: 545 - DNA, 25 bp, Artificial
  Primer
gaaggagcaagtaacagctccaaca

SEQ ID NO: 546 - DNA, 25 bp, Artificial
  Primer
gcaagtaacagctccaacacactga

SEQ ID NO: 547 - DNA, 25 bp, Artificial
  Primer
taacagctccaacacactgaagcag

SEQ ID NO: 548 - DNA, 25 bp, Artificial
  Primer
tcactgtcggagttgatgaggagcc

SEQ ID NO: 549 - DNA, 25 bp, Artificial
  Primer
tcacgtcactgtcggagttgatgag

SEQ ID NO: 550 - DNA, 25 bp, Artificial
  Primer
gcattcacgtcactgtcggagttga

SEQ ID NO: 551 - DNA, 25 bp, Artificial
  Primer
acggcattcacgtcactgtcggagt

SEQ ID NO: 552 - DNA, 25 bp, Artificial
  Primer
ggatgataacgcgaagcgggtcccc

SEQ ID NO: 553 - DNA, 25 bp, Artificial
  Primer
gtgatcaagaaaagcgcgaaggccg

SEQ ID NO: 554 - DNA, 25 bp, Artificial
  Primer
ggccgaacgcgacgaaagtgcagcc

SEQ ID NO: 555 - DNA, 25 bp, Artificial
  Primer
aaagtgcagccgaaaaacaccgcag

SEQ ID NO: 556 - DNA, 25 bp, Artificial
  Primer
caaggtcagacaatcagtcctcggg

SEQ ID NO: 557 - DNA, 25 bp, Artificial
  Primer
tgaagcaaggtcagacaatcagtcc

SEQ ID NO: 558 - DNA, 25 bp, Artificial
  Primer
cgtgtgaagcaaggtcagacaatca

SEQ ID NO: 559 - DNA, 25 bp, Artificial
  Primer
ggcgtgtgaagcaaggtcagacaat

SEQ ID NO: 560 - DNA, 25 bp, Artificial
  Primer
accatgaaaaccacccgtgggccat

SEQ ID NO: 561 - DNA, 25 bp, Artificial
  Primer
cgctgcgacgtttggatgccacaaa

SEQ ID NO: 562 - DNA, 25 bp, Artificial
  Primer
gatgaaatcaagagcctgccgttcg

SEQ ID NO: 563 - DNA, 25 bp, Artificial
  Primer
tcgtcccggagcaaagatgaaatca

SEQ ID NO: 564 - DNA, 25 bp, Artificial
  Primer
cactggagaagttcactggatgccc

SEQ ID NO: 565 - DNA, 25 bp, Artificial
  Primer
tcatggctttcgatgagctgctcca

SEQ ID NO: 566 - DNA, 25 bp, Artificial
  Primer
caataggaagacgacatcatggctt

SEQ ID NO: 567 - DNA, 25 bp, Artificial
  Primer
tcttgcttgcagcaatgacggcagg

SEQ ID NO: 568 - DNA, 25 bp, Artificial
  Primer
ccagagatgcctgaccgggaatgtc

SEQ ID NO: 569 - DNA, 25 bp, Artificial
  Primer
tggaggtccaataatgcaacatcaa

SEQ ID NO: 570 - DNA, 25 bp, Artificial
  Primer
ccagaagcgtgccattgtaatgata

SEQ ID NO: 571 - DNA, 25 bp, Artificial
  Primer
atcaaagagggtgccatccagaagc

SEQ ID NO: 572 - DNA, 25 bp, Artificial
  Primer
tgtggaagtcgatcacatggatgtc

SEQ ID NO: 573 - DNA, 25 bp, Artificial
  Primer
gaggtaatctcccttcttactcagc

SEQ ID NO: 574 - DNA, 25 bp, Artificial
  Primer
cattgtagtgatatttgaggtaatc

SEQ ID NO: 575 - DNA, 25 bp, Artificial
  Primer
ggtcccatccagaagtgaggcattg

SEQ ID NO: 576 - DNA, 25 bp, Artificial
  Primer
ccggtcctggttggtgaacatattc

SEQ ID NO: 577 - DNA, 25 bp, Artificial
  Primer
aaagccaggagcgagtttccctttg

SEQ ID NO: 578 - DNA, 25 bp, Artificial
  Primer
gagcgagtttccctttgccagatgc

SEQ ID NO: 579 - DNA, 25 bp, Artificial
  Primer
cctgggcgtgaatgtactctgagaa

SEQ ID NO: 580 - DNA, 25 bp, Artificial
  Primer
gaggacttctccgttgccatccttg

SEQ ID NO: 581 - DNA, 25 bp, Artificial
  Primer
ggttgggtgacacctcaccattcca

SEQ ID NO: 582 - DNA, 25 bp, Artificial
  Primer
ccattccatatgaacatgtacccct

SEQ ID NO: 583 - DNA, 25 bp, Artificial
  Primer
caaacactaatacggcactgccggg

SEQ ID NO: 584 - DNA, 25 bp, Artificial
  Primer
cacgcaggggccctccgaagctgga

SEQ ID NO: 585 - DNA, 25 bp, Artificial
  Primer
gtgcacacttgctaaagcttctgta

SEQ ID NO: 586 - DNA, 25 bp, Artificial
  Primer
gaaggcaaagacttcgcttaagtcc

SEQ ID NO: 587 - DNA, 25 bp, Artificial
  Primer
agacttcgcttaagtccaggcaggg

SEQ ID NO: 588 - DNA, 25 bp, Artificial
  Primer
gcctgtccgtgctttcttctccagt

SEQ ID NO: 589 - DNA, 25 bp, Artificial
  Primer
tgcctgtccgtgctttcttctccag

SEQ ID NO: 590 - DNA, 25 bp, Artificial
  Primer
ctgcctgtccgtgctttcttctcca

SEQ ID NO: 591 - DNA, 25 bp, Artificial
  Primer
gcctgtccgtgctttcttctccagt

SEQ ID NO: 592 - DNA, 25 bp, Artificial
  Primer
tgcctgtccgtgctttcttctccag

SEQ ID NO: 593 - DNA, 25 bp, Artificial
  Primer
ctgcctgtccgtgctttcttctcca

SEQ ID NO: 594 - DNA, 25 bp, Artificial
  Primer
caagtgaattcaagtgatggctgcc

SEQ ID NO: 595 - DNA, 25 bp, Artificial
  Primer
ttctgctgaagagtaccaaaggcct

SEQ ID NO: 596 - DNA, 25 bp, Artificial
  Primer
gaaccagtggcctctgcaatggaga

SEQ ID NO: 597 - DNA, 25 bp, Artificial
  Primer
tgagtaacgaaggtggacaacatgc

SEQ ID NO: 598 - DNA, 25 bp, Artificial
  Primer
cagccaaagcgctctgactgagtcc

SEQ ID NO: 599 - DNA, 25 bp, Artificial
  Primer
caaagcgctctgactgagtcccaga

SEQ ID NO: 600 - DNA, 25 bp, Artificial
  Primer
tcccagaggcctcccgtttgcattt

SEQ ID NO: 601 - DNA, 25 bp, Artificial
  Primer
cccgtttgcatttctggctcaaagt

SEQ ID NO: 602 - DNA, 25 bp, Artificial
  Primer
cgtgaacacatagtcaaaatacctc

SEQ ID NO: 603 - DNA, 25 bp, Artificial
  Primer
cacgcccgtgaacacatagtcaaaa

SEQ ID NO: 604 - DNA, 25 bp, Artificial
  Primer
gtgaacacgcccgtgaacacatagt

SEQ ID NO: 605 - DNA, 25 bp, Artificial
  Primer
catctcaaaggtgaacacgcccgtg

SEQ ID NO: 606 - DNA, 25 bp, Artificial
  Primer
catggtaccggcatgaagcccttct

SEQ ID NO: 607 - DNA, 25 bp, Artificial
  Primer
taacagacacggttgcagttgactg

SEQ ID NO: 608 - DNA, 25 bp, Artificial
  Primer
gctgaattcccttggctaatggcac

SEQ ID NO: 609 - DNA, 25 bp, Artificial
  Primer
taatggcacttgattttctgcagca

SEQ ID NO: 610 - DNA, 25 bp, Artificial
  Primer
aacagcgtggccttccggtagctgg

SEQ ID NO: 611 - DNA, 25 bp, Artificial
  Primer
tcctcaaacagcgtggccttccggt

SEQ ID NO: 612 - DNA, 25 bp, Artificial
  Primer
tagtggcccacggtggccgcgccat

SEQ ID NO: 613 - DNA, 25 bp, Artificial
  Primer
cttgctgttctgtacggccgtatag

SEQ ID NO: 614 - DNA, 25 bp, Artificial
  Primer
gacacggccacgattctcttccaag

SEQ ID NO: 615 - DNA, 25 bp, Artificial
  Primer
aatgtggacaggttggcgcacgaca

SEQ ID NO: 616 - DNA, 25 bp, Artificial
  Primer
cctggacgatgacccgtttgggcgt

SEQ ID NO: 617 - DNA, 25 bp, Artificial
  Primer
gctcactggtggacgcctggacgat

SEQ ID NO: 618 - DNA, 25 bp, Artificial
  Primer
tgatccgagcccacctcggaggaga

SEQ ID NO: 619 - DNA, 25 bp, Artificial
  Primer
tgggtcggcatttatctgcagcatc

SEQ ID NO: 620 - DNA, 25 bp, Artificial
  Primer
tcggagaagacctgtgtgaagtagt

SEQ ID NO: 621 - DNA, 25 bp, Artificial
  Primer
cgctctcgttcttcaggtcggagaa

SEQ ID NO: 622 - DNA, 25 bp, Artificial
  Primer
cttgagccatgacgcaggctacagt

SEQ ID NO: 623 - DNA, 25 bp, Artificial
  Primer
gaatccttgagccatgacgcaggct

SEQ ID NO: 624 - DNA, 25 bp, Artificial
  Primer
tgcattgaatccttgagccatgacg

SEQ ID NO: 625 - DNA, 25 bp, Artificial
  Primer
aaaaatgcattgaatccttgagcca

SEQ ID NO: 626 - DNA, 25 bp, Artificial
  Primer
caggtgagtttctgctaagttcccg

SEQ ID NO: 627 - DNA, 25 bp, Artificial
  Primer
gagtttctgctaagttcccgtgagc

SEQ ID NO: 628 - DNA, 25 bp, Artificial
  Primer
gctaagttcccgtgagcagaaaaag

SEQ ID NO: 629 - DNA, 25 bp, Artificial
  Primer
taagttcccgtgagcagaaaaagag

SEQ ID NO: 630 - DNA, 25 bp, Artificial
  Primer
aatgtttgcatcagagtatagcaat

SEQ ID NO: 631 - DNA, 25 bp, Artificial
  Primer
atgtttgcatcagagtatagcaatt

SEQ ID NO: 632 - DNA, 25 bp, Artificial
  Primer
tgtttgcatcagagtatagcaattc

SEQ ID NO: 633 - DNA, 25 bp, Artificial
  Primer
gagaaggtggatctgtgagagggac

SEQ ID NO: 634 - DNA, 25 bp, Artificial
  Primer
gaaggtggatctgtgagagggacca

SEQ ID NO: 635 - DNA, 25 bp, Artificial
  Primer
aaggtggatctgtgagagggaccat

SEQ ID NO: 636 - DNA, 25 bp, Artificial
  Primer
gtggatctgtgagagggaccatggc

SEQ ID NO: 637 - DNA, 25 bp, Artificial
  Primer
ccccaaccaggaccccagtcacgat

SEQ ID NO: 638 - DNA, 25 bp, Artificial
  Primer
aggaccccagtcacgatgccagcga

SEQ ID NO: 639 - DNA, 25 bp, Artificial
  Primer
ccacaggaaggcctgggacgttgtt

SEQ ID NO: 640 - DNA, 25 bp, Artificial
  Primer
cacaggaaggcctgggacgttgttt

SEQ ID NO: 641 - DNA, 25 bp, Artificial
  Primer
ggccagttgcttggtcagagtcgta

SEQ ID NO: 642 - DNA, 25 bp, Artificial
  Primer
gcggcccctgggatatttgcttgaa

SEQ ID NO: 643 - DNA, 25 bp, Artificial
  Primer
tattgcaggccagtagaagaacatc

SEQ ID NO: 644 - DNA, 25 bp, Artificial
  Primer
cactggacggcagggcttcaatagt

SEQ ID NO: 645 - DNA, 25 bp, Artificial
  Primer
agccgcgcacgaagtctgtgcagcc

SEQ ID NO: 646 - DNA, 25 bp, Artificial
  Primer
tcagccgcgcacgaagtctgtgcag

SEQ ID NO: 647 - DNA, 25 bp, Artificial
  Primer
ctcagccgcgcacgaagtctgtgca

SEQ ID NO: 648 - DNA, 25 bp, Artificial
  Primer
cgctcagccgcgcacgaagtctgtg

SEQ ID NO: 649 - DNA, 25 bp, Artificial
  Primer
ctttgtgcatatatttggctgtctg

SEQ ID NO: 650 - DNA, 25 bp, Artificial
  Primer
tttgtgcatatatttggctgtctgc

SEQ ID NO: 651 - DNA, 25 bp, Artificial
  Primer
gggcttgtccaaccgcatgaggcgc

SEQ ID NO: 652 - DNA, 25 bp, Artificial
  Primer
cttgtccaaccgcatgaggcgcaag

SEQ ID NO: 653 - DNA, 25 bp, Artificial
  Primer
tgtccaaccgcatgaggcgcaagta

SEQ ID NO: 654 - DNA, 25 bp, Artificial
  Primer
ccaaccgcatgaggcgcaagtacgg

SEQ ID NO: 655 - DNA, 25 bp, Artificial
  Primer
ccactgccccttggtactcatcagc

SEQ ID NO: 656 - DNA, 25 bp, Artificial
  Primer
tgccccttggtactcatcagcctca

SEQ ID NO: 657 - DNA, 25 bp, Artificial
  Primer
aggtgcggcctgttgactcccaaaa

SEQ ID NO: 658 - DNA, 25 bp, Artificial
  Primer
tgcggcctgttgactcccaaaatac

SEQ ID NO: 659 - DNA, 25 bp, Artificial
  Primer
aaatgatgagattgtcatagaggaa

SEQ ID NO: 660 - DNA, 25 bp, Artificial
  Primer
ttccccatactttatgagagacagg

SEQ ID NO: 661 - DNA, 25 bp, Artificial
  Primer
gggtcatcagcggtcttgaatgtga

SEQ ID NO: 662 - DNA, 25 bp, Artificial
  Primer
catcagcggtcttgaatgtgagctc

SEQ ID NO: 663 - DNA, 25 bp, Artificial
  Primer
cttgggattgctcaagacgatgttc

SEQ ID NO: 664 - DNA, 25 bp, Artificial
  Primer
gacaacgcgttcctcttcttgggat

SEQ ID NO: 665 - DNA, 25 bp, Artificial
  Primer
ctgtcagcgtcatgaagaatgtcac

SEQ ID NO: 666 - DNA, 25 bp, Artificial
  Primer
gactttcagatcgttgctgtcagcg

SEQ ID NO: 667 - DNA, 25 bp, Artificial
  Primer
ttgaccatggcaatgacgggaacgg

SEQ ID NO: 668 - DNA, 25 bp, Artificial
  Primer
gcaatgtcgcagctggcaaccagtt

SEQ ID NO: 669 - DNA, 25 bp, Artificial
  Primer
caaaagaggacttgtcgctcgccac

SEQ ID NO: 670 - DNA, 25 bp, Artificial
  Primer
gacgttcaccccaggagtggcaaaa

SEQ ID NO: 671 - DNA, 25 bp, Artificial
  Primer
tcgctggcaaactgccggccttctt

SEQ ID NO: 672 - DNA, 25 bp, Artificial
  Primer
ggcaaactgccggccttcttgtagc

SEQ ID NO: 673 - DNA, 25 bp, Artificial
  Primer
caaactgccggccttcttgtagctt

SEQ ID NO: 674 - DNA, 25 bp, Artificial
  Primer
gcttctgcagttcccggggcagcgg

SEQ ID NO: 675 - DNA, 25 bp, Artificial
  Primer
tagcgcctgttagctggatctttga

SEQ ID NO: 676 - DNA, 25 bp, Artificial
  Primer
gacatgcggggtctccaagggcacc

SEQ ID NO: 677 - DNA, 25 bp, Artificial
  Primer
cggagaactccacgctgtagagtgg

SEQ ID NO: 678 - DNA, 25 bp, Artificial
  Primer
cgaagggctcctcggagaactccac

SEQ ID NO: 679 - DNA, 25 bp, Artificial
  Primer
agaggtagatgtccacggccttgat

SEQ ID NO: 680 - DNA, 25 bp, Artificial
  Primer
gatgtccacggccttgatgtaggag

SEQ ID NO: 681 - DNA, 25 bp, Artificial
  Primer
cattcacgcccgtgatgatggtgga

SEQ ID NO: 682 - DNA, 25 bp, Artificial
  Primer
tcacgcccgtgatgatggtggacat

SEQ ID NO: 683 - DNA, 25 bp, Artificial
  Primer
tcttctgtcaggatatggcttctgg

SEQ ID NO: 684 - DNA, 25 bp, Artificial
  Primer
aggctgttggcctcagactcactgt

SEQ ID NO: 685 - DNA, 25 bp, Artificial
  Primer
tcactgtagcttccatccagcatca

SEQ ID NO: 686 - DNA, 25 bp, Artificial
  Primer
gaagcattccacacatgcacgggaa

SEQ ID NO: 687 - DNA, 25 bp, Artificial
  Primer
agaggtagatgtccacggccttgac

SEQ ID NO: 688 - DNA, 25 bp, Artificial
  Primer
ggtagatgtccacggccttgacgta

SEQ ID NO: 689 - DNA, 25 bp, Artificial
  Primer
agatgtccacggccttgacgtagga

SEQ ID NO: 690 - DNA, 25 bp, Artificial
  Primer
gatgtccacggccttgacgtaggag

SEQ ID NO: 691 - DNA, 25 bp, Artificial
  Primer
gaagatgtggcgacgcaacgtgaag

SEQ ID NO: 692 - DNA, 25 bp, Artificial
  Primer
gatgtggcgacgcaacgtgaagtta

SEQ ID NO: 693 - DNA, 25 bp, Artificial
  Primer
tgtggcgacgcaacgtgaagttaat

SEQ ID NO: 694 - DNA, 25 bp, Artificial
  Primer
tggcgacgcaacgtgaagttaatgt

SEQ ID NO: 695 - DNA, 25 bp, Artificial
  Primer
tcatcgggcacacaatggtcttgcg

SEQ ID NO: 696 - DNA, 25 bp, Artificial
  Primer
ggtcaattacatcaatcatcgggca

SEQ ID NO: 697 - DNA, 25 bp, Artificial
  Primer
tgcctgtgtctcgtaccgaaagtcg

SEQ ID NO: 698 - DNA, 25 bp, Artificial
  Primer
gatcgggatccgcttgtagtacatc

SEQ ID NO: 699 - DNA, 25 bp, Artificial
  Primer
caaatggaaccaagtgatgctcaca

SEQ ID NO: 700 - DNA, 25 bp, Artificial
  Primer
aaatggaaccaagtgatgctcacac

SEQ ID NO: 701 - DNA, 25 bp, Artificial
  Primer
acgactgggtttggatgtgattctc

SEQ ID NO: 702 - DNA, 25 bp, Artificial
  Primer
taaaacgatccagggcagacgactg

SEQ ID NO: 703 - DNA, 25 bp, Artificial
  Primer
tgagttcatggcattaaaacgatcc

SEQ ID NO: 704 - DNA, 25 bp, Artificial
  Primer
gccaatggaatctgatgccaaggct

SEQ ID NO: 705 - DNA, 25 bp, Artificial
  Primer
tggttggctgctgccgcatcacgtg

SEQ ID NO: 706 - DNA, 25 bp, Artificial
  Primer
tgctggaagggtcacatgaccggtc

SEQ ID NO: 707 - DNA, 25 bp, Artificial
  Primer
tgaccggtcaatagtgcaggctgct

SEQ ID NO: 708 - DNA, 25 bp, Artificial
  Primer
taatggcttccgtgagcatgcgtat

SEQ ID NO: 709 - DNA, 25 bp, Artificial
  Primer
gtgcaccagcaatttacttccagag

SEQ ID NO: 710 - DNA, 25 bp, Artificial
  Primer
catcatgttgcaagtgcaccagcaa

SEQ ID NO: 711 - DNA, 25 bp, Artificial
  Primer
caagccatcatgttgcaagtgcacc

SEQ ID NO: 712 - DNA, 25 bp, Artificial
  Primer
ttccccatactccagcaagccatca

SEQ ID NO: 713 - DNA, 25 bp, Artificial
  Primer
agctgaagtcgaggttcatgtagtc

SEQ ID NO: 714 - DNA, 25 bp, Artificial
  Primer
tgctggcggacaagagcgaggagga

SEQ ID NO: 715 - DNA, 25 bp, Artificial
  Primer
ccgggctcgccaaagtcgatgttga

SEQ ID NO: 716 - DNA, 25 bp, Artificial
  Primer
tccggtggcagtgggtactcgtgca

SEQ ID NO: 717 - DNA, 25 bp, Artificial
  Primer
tcatgggcatgtagccgtcgtctgc

SEQ ID NO: 718 - DNA, 25 bp, Artificial
  Primer
cctgtgggagccgatctcgatgtct

SEQ ID NO: 719 - DNA, 25 bp, Artificial
  Primer
gatgtctccgtagtcctctgggtag

SEQ ID NO: 720 - DNA, 25 bp, Artificial
  Primer
cagggtgtattcatccagcgaggca

SEQ ID NO: 721 - DNA, 25 bp, Artificial
  Primer
ctctacttctttgcggtaaattatt

SEQ ID NO: 722 - DNA, 25 bp, Artificial
  Primer
cctctacttctttgcggtaaattat

SEQ ID NO: 723 - DNA, 25 bp, Artificial
  Primer
tcttccctctacttctttgcggtaa

SEQ ID NO: 724 - DNA, 25 bp, Artificial
  Primer
ctggtcttccctctacttctttgcg

SEQ ID NO: 725 - DNA, 25 bp, Artificial
  Primer
tgctagttgccgccgaattgcttcc

SEQ ID NO: 726 - DNA, 25 bp, Artificial
  Primer
agttgccgccgaattgcttccccta

SEQ ID NO: 727 - DNA, 25 bp, Artificial
  Primer
agtttcttcttatgatcccggctgg

SEQ ID NO: 728 - DNA, 25 bp, Artificial
  Primer
tcttcttatgatcccggctggtttt

SEQ ID NO: 729 - DNA, 25 bp, Artificial
  Primer
ttgttcttctatgtgacccaacagc

SEQ ID NO: 730 - DNA, 25 bp, Artificial
  Primer
gacagtatcttttaggtcaaccagg

SEQ ID NO: 731 - DNA, 25 bp, Artificial
  Primer
cagaagccgggtaattttagcatcc

SEQ ID NO: 732 - DNA, 25 bp, Artificial
  Primer
tatgtgaactcttcctgcgtgggtc

SEQ ID NO: 733 - DNA, 25 bp, Artificial
  Primer
cgtgggtccccaagagcgcttatta

SEQ ID NO: 734 - DNA, 25 bp, Artificial
  Primer
tccaaaagactcatcacttcacctg

SEQ ID NO: 735 - DNA, 25 bp, Artificial
  Primer
caaaagactcatcacttcacctgca

SEQ ID NO: 736 - DNA, 25 bp, Artificial
  Primer
aaagactcatcacttcacctgcact

SEQ ID NO: 737 - DNA, 25 bp, Artificial
  Primer
tgcactctccacatggcattccttg

SEQ ID NO: 738 - DNA, 25 bp, Artificial
  Primer
tacgattacgaaaccaatcagcaaa

SEQ ID NO: 739 - DNA, 25 bp, Artificial
  Primer
tcatgccagctacgattacgaaacc

SEQ ID NO: 740 - DNA, 25 bp, Artificial
  Primer
tcacaataatgcacatcatgccagc

SEQ ID NO: 741 - DNA, 25 bp, Artificial
  Primer
ttgtaggtcagaatcatcacaataa

SEQ ID NO: 742 - DNA, 25 bp, Artificial
  Primer
gataagagccagtcaccaggttaaa

SEQ ID NO: 743 - DNA, 25 bp, Artificial
  Primer
cctcctgaggtaggtcatgcaaaca

SEQ ID NO: 744 - DNA, 25 bp, Artificial
  Primer
tgcaaacattcctggccggtctcaa

SEQ ID NO: 745 - DNA, 25 bp, Artificial
  Primer
gggatcccctgatgtatggcctcaa

SEQ ID NO: 746 - DNA, 25 bp, Artificial
  Primer
aggacccgctggacattctgcttgg

SEQ ID NO: 747 - DNA, 25 bp, Artificial
  Primer
tgcttggtgatcagcgccttgctgg

SEQ ID NO: 748 - DNA, 25 bp, Artificial
  Primer
tacgtgtagtccaacagagtgtgca

SEQ ID NO: 749 - DNA, 25 bp, Artificial
  Primer
ttcctttaaatcgttgcagaacatg

SEQ ID NO: 750 - DNA, 25 bp, Artificial
  Primer
agttgagcctcttgtccttgtagag

SEQ ID NO: 751 - DNA, 25 bp, Artificial
  Primer
tgaagttgagcctcttgtccttgta

SEQ ID NO: 752 - DNA, 25 bp, Artificial
  Primer
tgatgaagttgagcctcttgtcctt

SEQ ID NO: 753 - DNA, 25 bp, Artificial
  Primer
agtgatgaagttgagcctcttgtcc

SEQ ID NO: 754 - DNA, 25 bp, Artificial
  Primer
ggggctgtcggcatcgtctttgtac

SEQ ID NO: 755 - DNA, 25 bp, Artificial
  Primer
ggcatcggcgtcgaaggtgaactcc

SEQ ID NO: 756 - DNA, 25 bp, Artificial
  Primer
cctggcagtagatggtgatggccac

SEQ ID NO: 757 - DNA, 25 bp, Artificial
  Primer
tgccgttcaggaactcctccgatgc

SEQ ID NO: 758 - DNA, 25 bp, Artificial
  Primer
gccggcagctgaacttactgggcat

SEQ ID NO: 759 - DNA, 25 bp, Artificial
  Primer
aggaaactctcgaaacactggcccg

SEQ ID NO: 760 - DNA, 25 bp, Artificial
  Primer
agccgctcgcgatctgtctccatgt

SEQ ID NO: 761 - DNA, 25 bp, Artificial
  Primer
gttataaatggtccgcagccgctcg

SEQ ID NO: 762 - DNA, 25 bp, Artificial
  Primer
cagcgccatacttaactccaggtca

SEQ ID NO: 763 - DNA, 25 bp, Artificial
  Primer
tgggtagtatgtccccagcgccata

SEQ ID NO: 764 - DNA, 25 bp, Artificial
  Primer
gcagtgaagatacttgttccctgaa

SEQ ID NO: 765 - DNA, 25 bp, Artificial
  Primer
gatctctgcgatctccttaggggca

SEQ ID NO: 766 - DNA, 25 bp, Artificial
  Primer
agcttcacctcatagttcctccact

SEQ ID NO: 767 - DNA, 25 bp, Artificial
  Primer
tgccggatatcatgctccatctgca

SEQ ID NO: 768 - DNA, 25 bp, Artificial
  Primer
gactccaggtcatagtgccggatat

SEQ ID NO: 769 - DNA, 25 bp, Artificial
  Primer
caggtcatgggcaccgactccaggt

SEQ ID NO: 770 - DNA, 25 bp, Artificial
  Primer
tgaagtgatcaatgggaaactgggc

SEQ ID NO: 771 - DNA, 25 bp, Artificial
  Primer
aagatgtgtgtgaagtgatcaatgg

SEQ ID NO: 772 - DNA, 25 bp, Artificial
  Primer
cagtggccagcctcatcgatgaaga

SEQ ID NO: 773 - DNA, 25 bp, Artificial
  Primer
ccatgcagtggccagcctcatcgat

SEQ ID NO: 774 - DNA, 25 bp, Artificial
  Primer
cccattacgccgtgaaagatgatgg

SEQ ID NO: 775 - DNA, 25 bp, Artificial
  Primer
ctttgcccattacgccgtgaaagat

SEQ ID NO: 776 - DNA, 25 bp, Artificial
  Primer
ctcatctttgcccattacgccgtga

SEQ ID NO: 777 - DNA, 25 bp, Artificial
  Primer
ttcacgctcatctttgcccattacg

SEQ ID NO: 778 - DNA, 25 bp, Artificial
  Primer
ctttctcatccaccgctcgatttat

SEQ ID NO: 779 - DNA, 25 bp, Artificial
  Primer
tccaccgctcgatttatgtcataag

SEQ ID NO: 780 - DNA, 25 bp, Artificial
  Primer
taagaccatgcatcatcttcccatt

SEQ ID NO: 781 - DNA, 25 bp, Artificial
  Primer
caacctggaggacaagtcaactcgc

SEQ ID NO: 782 - DNA, 25 bp, Artificial
  Primer
gttgttgccaaacagcacgcgctgg

SEQ ID NO: 783 - DNA, 25 bp, Artificial
  Primer
cggcatccacgaagacaagcttgtg

SEQ ID NO: 784 - DNA, 25 bp, Artificial
  Primer
tccaccaggatgtagcggtccaatg

SEQ ID NO: 785 - DNA, 25 bp, Artificial
  Primer
gaagatgtcatcaatgtccaccagg

SEQ ID NO: 786 - DNA, 25 bp, Artificial
  Primer
aatctccgcatcttcggccgagaag

SEQ ID NO: 787 - DNA, 25 bp, Artificial
  Primer
tcttcagcaagttgtccaccagaca

SEQ ID NO: 788 - DNA, 25 bp, Artificial
  Primer
tgagtattgcggatgtgagtgacca

SEQ ID NO: 789 - DNA, 25 bp, Artificial
  Primer
tgcggatgtgagtgaccagaagttc

SEQ ID NO: 790 - DNA, 25 bp, Artificial
  Primer
cgggctccagatagatgaggcagct

SEQ ID NO: 791 - DNA, 25 bp, Artificial
  Primer
catacacgaggtgttgctaggcgcg

SEQ ID NO: 792 - DNA, 25 bp, Artificial
  Primer
cctggccgtaggacatgggataaga

SEQ ID NO: 793 - DNA, 25 bp, Artificial
  Primer
tagggtagccttggccgtagctgcc

SEQ ID NO: 794 - DNA, 25 bp, Artificial
  Primer
gcgctaggtatgagctgcagtccac

SEQ ID NO: 795 - DNA, 25 bp, Artificial
  Primer
tgcatgggcgctaggtatgagctgc

SEQ ID NO: 796 - DNA, 25 bp, Artificial
  Primer
gatgtgagtgcatgggcgctaggta

SEQ ID NO: 797 - DNA, 25 bp, Artificial
  Primer
tgcgggtggtgatgtgagtgcatgg

SEQ ID NO: 798 - DNA, 25 bp, Artificial
  Primer
cagtcggcagagttgaaggcaagcc

SEQ ID NO: 799 - DNA, 25 bp, Artificial
  Primer
ccttgtaatccaagcagtcggcaga

SEQ ID NO: 800 - DNA, 25 bp, Artificial
  Primer
tgaggcttggtccttatagtccaga

SEQ ID NO: 801 - DNA, 25 bp, Artificial
  Primer
acctggaaccgccatgaggcttggt

SEQ ID NO: 802 - DNA, 25 bp, Artificial
  Primer
tatagaatgtgtaggccaagccgaa

SEQ ID NO: 803 - DNA, 25 bp, Artificial
  Primer
tgttgggctcaaacagcggatcaga

SEQ ID NO: 804 - DNA, 25 bp, Artificial
  Primer
gaaacacgccagttagtgactccag

SEQ ID NO: 805 - DNA, 25 bp, Artificial
  Primer
tgactatgtacagcgttcccgccga

SEQ ID NO: 806 - DNA, 25 bp, Artificial
  Primer
cggtcgaacggcagctccagcttca

SEQ ID NO: 807 - DNA, 25 bp, Artificial
  Primer
caccagcacggtgccgatggtgacc

SEQ ID NO: 808 - DNA, 25 bp, Artificial
  Primer
tcttggtgaagaccagggtgaccag

SEQ ID NO: 809 - DNA, 25 bp, Artificial
  Primer
aagttcttggtgaagaccagggtga

SEQ ID NO: 810 - DNA, 25 bp, Artificial
  Primer
taacagttgtcgatctcctgcagca

SEQ ID NO: 811 - DNA, 25 bp, Artificial
  Primer
tctgcttctcgatcttgggcgcgcg

SEQ ID NO: 812 - DNA, 25 bp, Artificial
  Primer
cttctgcgtggcgtagtaggtgcac

SEQ ID NO: 813 - DNA, 25 bp, Artificial
  Primer
atgaggttcatgacgcacagcagca

SEQ ID NO: 814 - DNA, 25 bp, Artificial
  Primer
gctccacaagtaaagatgcaaaagt

SEQ ID NO: 815 - DNA, 25 bp, Artificial
  Primer
cagctccacaagtaaagatgcaaaa

SEQ ID NO: 816 - DNA, 25 bp, Artificial
  Primer
cacagctccacaagtaaagatgcaa

SEQ ID NO: 817 - DNA, 25 bp, Artificial
  Primer
gccacagctccacaagtaaagatgc

SEQ ID NO: 818 - DNA, 25 bp, Artificial
  Primer
tccaggctcaacattagcaggagga

SEQ ID NO: 819 - DNA, 25 bp, Artificial
  Primer
tgcaattccaggctcaacattagca

SEQ ID NO: 820 - DNA, 25 bp, Artificial
  Primer
tatctggtgaagctgcaattccagg

SEQ ID NO: 821 - DNA, 25 bp, Artificial
  Primer
ctgctatctggtgaagctgcaattc

SEQ ID NO: 822 - DNA, 25 bp, Artificial
  Primer
cacagaaccaaaaggccgtggtgcc

SEQ ID NO: 823 - DNA, 25 bp, Artificial
  Primer
tgcagtccagatgcagcgaacaggg

SEQ ID NO: 824 - DNA, 25 bp, Artificial
  Primer
gactggtcagcactaagattggcat

SEQ ID NO: 825 - DNA, 25 bp, Artificial
  Primer
gccgtgggacattaactgcagtttt

SEQ ID NO: 826 - DNA, 25 bp, Artificial
  Primer
cctctacaaatccaatgtaggccat

SEQ ID NO: 827 - DNA, 25 bp, Artificial
  Primer
cctttctcctctacaaatccaatgt

SEQ ID NO: 828 - DNA, 25 bp, Artificial
  Primer
cctttggcatcgaccacattcaggg

SEQ ID NO: 829 - DNA, 25 bp, Artificial
  Primer
tcttcctttggcatcgaccacattc

SEQ ID NO: 830 - DNA, 25 bp, Artificial
  Primer
tgttactaagatcaacagatctagg

SEQ ID NO: 831 - DNA, 25 bp, Artificial
  Primer
aagaagccattgctagaggatgctt

SEQ ID NO: 832 - DNA, 25 bp, Artificial
  Primer
gagatcctgcttgttcccaagaagc

SEQ ID NO: 833 - DNA, 25 bp, Artificial
  Primer
cgttggttgagatcctgcttgttcc

SEQ ID NO: 834 - DNA, 25 bp, Artificial
  Primer
cagtttcacaggtattccactggaa

SEQ ID NO: 835 - DNA, 25 bp, Artificial
  Primer
tactggtatagctgccagtcttggg

SEQ ID NO: 836 - DNA, 25 bp, Artificial
  Primer
gatggcaccgtcgaatgcttttgct

SEQ ID NO: 837 - DNA, 25 bp, Artificial
  Primer
tttgtgacagaaaaaggatggcacc

SEQ ID NO: 838 - DNA, 25 bp, Artificial
  Primer
tccagaaccgtctcattccggagga

SEQ ID NO: 839 - DNA, 25 bp, Artificial
  Primer
gagagcagtcatgaattccagaacc

SEQ ID NO: 840 - DNA, 25 bp, Artificial
  Primer
ggtgaaacaggacaagccagttctt

SEQ ID NO: 841 - DNA, 25 bp, Artificial
  Primer
tattagctgcttctcacacgtctgg

SEQ ID NO: 842 - DNA, 25 bp, Artificial
  Primer
atctcggtgccatcccgcttctgaa

SEQ ID NO: 843 - DNA, 25 bp, Artificial
  Primer
cacataggtgatctcggtgccatcc

SEQ ID NO: 844 - DNA, 25 bp, Artificial
  Primer
tagtaatccacataggtgatctcgg

SEQ ID NO: 845 - DNA, 25 bp, Artificial
  Primer
ctgcttgtagtaatccacataggtg

SEQ ID NO: 846 - DNA, 25 bp, Artificial
  Primer
ccctgtttattcaaggtccgagcaa

SEQ ID NO: 847 - DNA, 25 bp, Artificial
  Primer
ttggtggcgatactcatcatcatgc

SEQ ID NO: 848 - DNA, 25 bp, Artificial
  Primer
catctgcatagcgatcttggtggcg

SEQ ID NO: 849 - DNA, 25 bp, Artificial
  Primer
gctcgcctccgagcttgcaagtcat

SEQ ID NO: 850 - DNA, 25 bp, Artificial
  Primer
catcaataccgaccaccatcaggga

SEQ ID NO: 851 - DNA, 25 bp, Artificial
  Primer
ctgagtgcatctttacagacatcaa

SEQ ID NO: 852 - DNA, 25 bp, Artificial
  Primer
gcatccaacaaccatcacgtccttg

SEQ ID NO: 853 - DNA, 25 bp, Artificial
  Primer
gttaacactggccacgcatccaaca

SEQ ID NO: 854 - DNA, 25 bp, Artificial
  Primer
aagcaatctgcaacatcagtcattg

SEQ ID NO: 855 - DNA, 25 bp, Artificial
  Primer
tttcaagcaatctgcaacatcagtc

SEQ ID NO: 856 - DNA, 25 bp, Artificial
  Primer
gaaaactttcaagcaatctgcaaca

SEQ ID NO: 857 - DNA, 25 bp, Artificial
  Primer
atgaaaactttcaagcaatctgcaa

SEQ ID NO: 858 - DNA, 25 bp, Artificial
  Primer
ggtcacagaaatctgccagcgtcat

SEQ ID NO: 859 - DNA, 25 bp, Artificial
  Primer
tgtaagcatcaatcaccccagctgc

SEQ ID NO: 860 - DNA, 25 bp, Artificial
  Primer
atgctctctggtacagacccgcgat

SEQ ID NO: 861 - DNA, 25 bp, Artificial
  Primer
gctctctggtacagacccgcgatca

SEQ ID NO: 862 - DNA, 25 bp, Artificial
  Primer
ctcggtggcagatacgagatggaaa

SEQ ID NO: 863 - DNA, 25 bp, Artificial
  Primer
taaagttctcggtggcagatacgag

SEQ ID NO: 864 - DNA, 25 bp, Artificial
  Primer
cactgtaaagttctcggtggcagat

SEQ ID NO: 865 - DNA, 25 bp, Artificial
  Primer
ttacactgtaaagttctcggtggca

SEQ ID NO: 866 - DNA, 25 bp, Artificial
  Primer
atcagaacgcaggcaggcacatttg

SEQ ID NO: 867 - DNA, 25 bp, Artificial
  Primer
ctccaggggtgatcagaacgcaggc

SEQ ID NO: 868 - DNA, 25 bp, Artificial
  Primer
tctccaggggtgatcagaacgcagg

SEQ ID NO: 869 - DNA, 25 bp, Artificial
  Primer
agtctccaggggtgatcagaacgca

SEQ ID NO: 870 - DNA, 25 bp, Artificial
  Primer
agcgagactgggttttctgagcaac

SEQ ID NO: 871 - DNA, 25 bp, Artificial
  Primer
tttagcgagactgggttttctgagc

SEQ ID NO: 872 - DNA, 25 bp, Artificial
  Primer
agtgctttagcgagactgggttttc

SEQ ID NO: 873 - DNA, 25 bp, Artificial
  Primer
ctgaagtgctttagcgagactgggt

SEQ ID NO: 874 - DNA, 25 bp, Artificial
  Primer
cacagagtgtatctcgagttgccat

SEQ ID NO: 875 - DNA, 25 bp, Artificial
  Primer
tccacagagtgtatctcgagttgcc

SEQ ID NO: 876 - DNA, 25 bp, Artificial
  Primer
tctccacagagtgtatctcgagttg

SEQ ID NO: 877 - DNA, 25 bp, Artificial
  Primer
agtctccacagagtgtatctcgagt

SEQ ID NO: 878 - DNA, 25 bp, Artificial
  Primer
gaagatgtagctgagtactgcctgg

SEQ ID NO: 879 - DNA, 25 bp, Artificial
  Primer
aatggagagaaacgagtcagcagcc

SEQ ID NO: 880 - DNA, 25 bp, Artificial
  Primer
agcccacacctgtcgaggagctgaa

SEQ ID NO: 881 - DNA, 25 bp, Artificial
  Primer
cacgggcaatgggaggaatttcaac

SEQ ID NO: 882 - DNA, 25 bp, Artificial
  Primer
tacttctcgcagaagcggctggtga

SEQ ID NO: 883 - DNA, 25 bp, Artificial
  Primer
tgaggtgctcgatccagggccagtt

SEQ ID NO: 884 - DNA, 25 bp, Artificial
  Primer
tacttgtcgctggtgccgaaggtga

SEQ ID NO: 885 - DNA, 25 bp, Artificial
  Primer
gcaggccactgaggaagccgaagat

SEQ ID NO: 886 - DNA, 25 bp, Artificial
  Primer
ctctgcccggtatgggagaaagatg

SEQ ID NO: 887 - DNA, 25 bp, Artificial
  Primer
cactggcgaggttgcctgtgatgcc

SEQ ID NO: 888 - DNA, 25 bp, Artificial
  Primer
ccaggtccctcaggatggtcatttg

SEQ ID NO: 889 - DNA, 25 bp, Artificial
  Primer
tgaaagaccacagacacgaggcagt

SEQ ID NO: 890 - DNA, 25 bp, Artificial
  Primer
ggtggctgtcgaagctctccagctg

SEQ ID NO: 891 - DNA, 25 bp, Artificial
  Primer
gtagctgcggttcagccagttgccc

SEQ ID NO: 892 - DNA, 25 bp, Artificial
  Primer
gccgtagtgccgcttcttccgatca

SEQ ID NO: 893 - DNA, 25 bp, Artificial
  Primer
gcttcttccgatcaaaggcaaagtg

SEQ ID NO: 894 - DNA, 25 bp, Artificial
  Primer
cagcggcagcttgcaagctcatgtg

SEQ ID NO: 895 - DNA, 25 bp, Artificial
  Primer
cggcagcttgcaagctcatgtgggc

SEQ ID NO: 896 - DNA, 25 bp, Artificial
  Primer
gcagcttgcaagctcatgtgggcca

SEQ ID NO: 897 - DNA, 25 bp, Artificial
  Primer
agcttgcaagctcatgtgggccaca

SEQ ID NO: 898 - DNA, 25 bp, Artificial
  Primer
gctggcagacaaagccgcatgccat

SEQ ID NO: 899 - DNA, 25 bp, Artificial
  Primer
tccaggatgctgatgccccggcggt

SEQ ID NO: 900 - DNA, 25 bp, Artificial
  Primer
ccacaccgggcatgttttgatgagc

SEQ ID NO: 901 - DNA, 25 bp, Artificial
  Primer
accacccggtgcaggatcctggcca

SEQ ID NO: 902 - DNA, 25 bp, Artificial
  Primer
gatgaactggatggtcagcgcgctc

SEQ ID NO: 903 - DNA, 25 bp, Artificial
  Primer
atgaactggatggtcagcgcgctct

SEQ ID NO: 904 - DNA, 25 bp, Artificial
  Primer
tgaactggatggtcagcgcgctctt

SEQ ID NO: 905 - DNA, 25 bp, Artificial
  Primer
gaactggatggtcagcgcgctcttg

SEQ ID NO: 906 - DNA, 25 bp, Artificial
  Primer
tcggaaaaattgaactcgccctctc

SEQ ID NO: 907 - DNA, 25 bp, Artificial
  Primer
tccggatgctctgcatccatcttag

SEQ ID NO: 908 - DNA, 25 bp, Artificial
  Primer
tagtggtgagcgaaagctgactgca

SEQ ID NO: 909 - DNA, 25 bp, Artificial
  Primer
agctgactgcaaatgcacctcactc

SEQ ID NO: 910 - DNA, 25 bp, Artificial
  Primer
ttcagtgaccgtccagatgaccagg

SEQ ID NO: 911 - DNA, 25 bp, Artificial
  Primer
tgaccaggcttcaatgggtgtcccg

SEQ ID NO: 912 - DNA, 25 bp, Artificial
  Primer
cccgatgggatactgcagagtgtca

SEQ ID NO: 913 - DNA, 25 bp, Artificial
  Primer
taaaggtgacgtccaaagagccagc

SEQ ID NO: 914 - DNA, 25 bp, Artificial
  Primer
ctctttcacgggtccagaggctgct

SEQ ID NO: 915 - DNA, 25 bp, Artificial
  Primer
gagcttcagggagtagcctccatct

SEQ ID NO: 916 - DNA, 25 bp, Artificial
  Primer
tatccccacatagtagatccctgag

SEQ ID NO: 917 - DNA, 25 bp, Artificial
  Primer
gagtgatgagctgtatatccccaca

SEQ ID NO: 918 - DNA, 25 bp, Artificial
  Primer
gacccatggtgactttaggctttga

SEQ ID NO: 919 - DNA, 25 bp, Artificial
  Primer
ggtgccattcttattgctctgcaga

SEQ ID NO: 920 - DNA, 25 bp, Artificial
  Primer
cagggccttccaggtataaatcaca

SEQ ID NO: 921 - DNA, 25 bp, Artificial
  Primer
cagggttcctggcaacgcagatgaa

SEQ ID NO: 922 - DNA, 25 bp, Artificial
  Primer
acaggaggaccatggaggaatctgg

SEQ ID NO: 923 - DNA, 25 bp, Artificial
  Primer
acacaggaggaccatggaggaatct

SEQ ID NO: 924 - DNA, 25 bp, Artificial
  Primer
gacacaggaggaccatggaggaatc

SEQ ID NO: 925 - DNA, 25 bp, Artificial
  Primer
gaaatagccccagtacaaagagact

SEQ ID NO: 926 - DNA, 25 bp, Artificial
  Primer
ggagtttcccgacaaatgtccactc

SEQ ID NO: 927 - DNA, 25 bp, Artificial
  Primer
ggcatatgttaggagtttcccgaca

SEQ ID NO: 928 - DNA, 25 bp, Artificial
  Primer
tctctccagaatgggggcatatgtt

SEQ ID NO: 929 - DNA, 25 bp, Artificial
  Primer
gattgtgtcgtactctgtgttctct

SEQ ID NO: 930 - DNA, 25 bp, Artificial
  Primer
gctggatcttcctttaggattgttc

SEQ ID NO: 931 - DNA, 25 bp, Artificial
  Primer
gtaaaccgtatttgctggatcttcc

SEQ ID NO: 932 - DNA, 25 bp, Artificial
  Primer
cacagtggagtaaaccgtatttgct

SEQ ID NO: 933 - DNA, 25 bp, Artificial
  Primer
atttccacagtggagtaaaccgtat

SEQ ID NO: 934 - DNA, 25 bp, Artificial
  Primer
acctccggagcgccctcaatagagg

SEQ ID NO: 935 - DNA, 25 bp, Artificial
  Primer
tccgcaggatatgtttgaagaggct

SEQ ID NO: 936 - DNA, 25 bp, Artificial
  Primer
tagaccacgtagctgatgctcacag

SEQ ID NO: 937 - DNA, 25 bp, Artificial
  Primer
ttcaggttctcgtagaccacgtagc

SEQ ID NO: 938 - DNA, 25 bp, Artificial
  Primer
cagtatcaccataatccacaaagga

SEQ ID NO: 939 - DNA, 25 bp, Artificial
  Primer
ggctggattctagtccatacatcac

SEQ ID NO: 940 - DNA, 25 bp, Artificial
  Primer
cccagtgtgcgtggttccggagcca

SEQ ID NO: 941 - DNA, 25 bp, Artificial
  Primer
cttccccagtgtgcgtggttccgga

SEQ ID NO: 942 - DNA, 25 bp, Artificial
  Primer
ccagcgatcaatgaccccaagatgt

SEQ ID NO: 943 - DNA, 25 bp, Artificial
  Primer
cagcatgtggacacccagtagccag

SEQ ID NO: 944 - DNA, 25 bp, Artificial
  Primer
tgccacgatggctccaggcacgacg

SEQ ID NO: 945 - DNA, 25 bp, Artificial
  Primer
aagagaaagcacactatccccatgg

SEQ ID NO: 946 - DNA, 25 bp, Artificial
  Primer
tccactagagaatacgaacacgaga

SEQ ID NO: 947 - DNA, 25 bp, Artificial
  Primer
cactagagaatacgaacacgagagc

SEQ ID NO: 948 - DNA, 25 bp, Artificial
  Primer
tagagaatacgaacacgagagctgc

SEQ ID NO: 949 - DNA, 25 bp, Artificial
  Primer
agaatacgaacacgagagctgcccc

SEQ ID NO: 950 - DNA, 25 bp, Artificial
  Primer
gtcacagccatgaggacaggtctcc

SEQ ID NO: 951 - DNA, 25 bp, Artificial
  Primer
catacagtcatagagcagcaaatcc

SEQ ID NO: 952 - DNA, 25 bp, Artificial
  Primer
gtccacggcatacagtcatagagca

SEQ ID NO: 953 - DNA, 25 bp, Artificial
  Primer
caacaagtgggtagctgtggcatgg

SEQ ID NO: 954 - DNA, 25 bp, Artificial
  Primer
cattggctcggaaagtaaaacctca

SEQ ID NO: 955 - DNA, 25 bp, Artificial
  Primer
gctaaatatagaggccagctccgtc

SEQ ID NO: 956 - DNA, 25 bp, Artificial
  Primer
tgctttgcaatatgacggtccactg

SEQ ID NO: 957 - DNA, 25 bp, Artificial
  Primer
tagccactggtaagcctgaggatcc

SEQ ID NO: 958 - DNA, 25 bp, Artificial
  Primer
ttgccactcgctgattttctcatca

SEQ ID NO: 959 - DNA, 25 bp, Artificial
  Primer
ctcatcagcactgaggacaaaaaag

SEQ ID NO: 960 - DNA, 25 bp, Artificial
  Primer
caaaaaaggtgtgtgccgaggacca

SEQ ID NO: 961 - DNA, 25 bp, Artificial
  Primer
gatcagagcaccaatgtggcctgga

SEQ ID NO: 962 - DNA, 25 bp, Artificial
  Primer
catctccgggagagcagcgaggctt

SEQ ID NO: 963 - DNA, 25 bp, Artificial
  Primer
ggctgaggattgaagcctgctgcct

SEQ ID NO: 964 - DNA, 25 bp, Artificial
  Primer
ctgcctcaggaaggtgcgaaacact

SEQ ID NO: 965 - DNA, 25 bp, Artificial
  Primer
aaggtgcgaaacactgcaacgtcag

SEQ ID NO: 966 - DNA, 25 bp, Artificial
  Primer
aagagccgagagaccagacccaatt

SEQ ID NO: 967 - DNA, 25 bp, Artificial
  Primer
agacccaattccaagtgtgcagcca

SEQ ID NO: 968 - DNA, 25 bp, Artificial
  Primer
gtgtgcagccaccacatggaggttg

SEQ ID NO: 969 - DNA, 25 bp, Artificial
  Primer
agaagtccacggttcccgctctgga

SEQ ID NO: 970 - DNA, 25 bp, Artificial
  Primer
gacgaggttggtgaataggcccact

SEQ ID NO: 971 - DNA, 25 bp, Artificial
  Primer
taggcccactccaatcatgctggtg

SEQ ID NO: 972 - DNA, 25 bp, Artificial
  Primer
gctcaaagacgtagaggccaatcag

SEQ ID NO: 973 - DNA, 25 bp, Artificial
  Primer
ggccaatcagtacagcggtggagaa

SEQ ID NO: 974 - DNA, 25 bp, Artificial
  Primer
ccccgtggagaagacgacgatttct

SEQ ID NO: 975 - DNA, 25 bp, Artificial
  Primer
aggcataaactctccctccgcagaa

SEQ ID NO: 976 - DNA, 25 bp, Artificial
  Primer
ggtgttgacaaatttgcactggaca

SEQ ID NO: 977 - DNA, 25 bp, Artificial
  Primer
gctgtggaccagatcaaaaatcatc

SEQ ID NO: 978 - DNA, 25 bp, Artificial
  Primer
tggcaatacccagatacctcaggga

SEQ ID NO: 979 - DNA, 25 bp, Artificial
  Primer
gcacagtggcaatacccagatacct

SEQ ID NO: 980 - DNA, 25 bp, Artificial
  Primer
tcagcacagtggcaatacccagata

SEQ ID NO: 981 - DNA, 25 bp, Artificial
  Primer
tctcagccagttcccgcccttggct

SEQ ID NO: 982 - DNA, 25 bp, Artificial
  Primer
caggccagcaaaaatggtgtcataa

SEQ ID NO: 983 - DNA, 25 bp, Artificial
  Primer
cgtctctgcagtatccggtacaggg

SEQ ID NO: 984 - DNA, 25 bp, Artificial
  Primer
tgaactgcgaggaaccgtctctgca

SEQ ID NO: 985 - DNA, 25 bp, Artificial
  Primer
atcggaatctgccagagatgactga

SEQ ID NO: 986 - DNA, 25 bp, Artificial
  Primer
ctgcctttcggaggcacaagattgg

SEQ ID NO: 987 - DNA, 25 bp, Artificial
  Primer
gaggtcccaaagtagagtctggaca

SEQ ID NO: 988 - DNA, 25 bp, Artificial
  Primer
tgctggctgaagtagcctgaggtcc

SEQ ID NO: 989 - DNA, 25 bp, Artificial
  Primer
gggaagagaacaggtcgtgctggct

SEQ ID NO: 990 - DNA, 25 bp, Artificial
  Primer
gagcaggaccccgtgctttttccaa

SEQ ID NO: 991 - DNA, 25 bp, Artificial
  Primer
gcactgctgagagctacatctggga

SEQ ID NO: 992 - DNA, 25 bp, Artificial
  Primer
ttcaaaagtctcaacagcactgctg

SEQ ID NO: 993 - DNA, 25 bp, Artificial
  Primer
caaagctgcctttgtgtaccaaagt

SEQ ID NO: 994 - DNA, 25 bp, Artificial
  Primer
tcctggaagtgaacatcaacgaaga

SEQ ID NO: 995 - DNA, 25 bp, Artificial
  Primer
gaacatcaacgaagacagaaaggcc

SEQ ID NO: 996 - DNA, 25 bp, Artificial
  Primer
ctgtctctcctcttgcacgtgggca

SEQ ID NO: 997 - DNA, 25 bp, Artificial
  Primer
tgtctctcctcttgcacgtgggcac

SEQ ID NO: 998 - DNA, 25 bp, Artificial
  Primer
acattgaaggctggctcctcgatca

SEQ ID NO: 999 - DNA, 25 bp, Artificial
  Primer
ggtacatgcgcctccggatgaagaa

SEQ ID NO: 1000 - DNA, 25 bp, Artificial
  Primer
ccggctccgcagcagaaaagcacgc

SEQ ID NO: 1001 - DNA, 25 bp, Artificial
  Primer
cagaaaagcacgcccatcatcagaa

SEQ ID NO: 1002 - DNA, 25 bp, Artificial
  Primer
ccacagcagtcctcgtaggagcggc

SEQ ID NO: 1003 - DNA, 25 bp, Artificial
  Primer
cacagcagtcctcgtaggagcggca

SEQ ID NO: 1004 - DNA, 25 bp, Artificial
  Primer
ggtctgagatctccaggcggggcag

SEQ ID NO: 1005 - DNA, 25 bp, Artificial
  Primer
gcgctggagccgaagctgccggcct

SEQ ID NO: 1006 - DNA, 25 bp, Artificial
  Primer
ctcatcctcagctggattatagtcg

SEQ ID NO: 1007 - DNA, 25 bp, Artificial
  Primer
tcagctggattatagtcgctatcct

What is claimed is:

1. A method for assessing whether a subject has, or is at risk of developing, one of a plurality of conditions selected from sepsis, infection-negative SIRS (“inSIRS”) and post-surgical inflammation, the method comprising: comparing the level of at least one inflammatory response continuum (IRC) marker expression product of a multi-transcript-producing gene in the subject to the level of a corresponding IRC marker expression product in at least one control subject selected from: a post-surgical inflammation-positive subject, an inSIRS positive subject, a sepsis-positive subject and a normal subject, wherein a difference between the level of the at least one IRC marker expression product and the level of the corresponding IRC marker expression product indicates whether the subject has, or is at risk of developing, one of the conditions, wherein the at least one IRC marker expression product is predetermined as being differentially expressed between at least two of the conditions and wherein at least one other expression product from the multi-transcript producing gene is predetermined as being not so differentially expressed.

2. A method according to claim 1, wherein the multi-transcript-producing gene is selected from the group consisting of: ankyrin repeat and death domain containing 1A (ANKDD1A) gene, rho 2 (GABRR2) gene, orthodenticle homeobox 1 (OTX1) gene, pannexin 2 (PANX2) gene, rhomboid 5 homolog 2 (Drosophila) (RHBDF2) gene, SLAM family member 7 (SLAMF7) gene, autophagy/beclin-1 regulator 1 (AMBRA1) gene, carboxylesterase 2 (intestine, liver) (CES2) gene, caseinolytic peptidase B homolog (E. coli) (CLPB) gene, homeodomain interacting protein kinase 2 (HIPK2) gene and chromosome 1 open reading frame 91 (C1ORF91) gene, N-deacetylase/N-sulfotransferase (heparan glucosaminyl) 1 (NDST1) gene, solute carrier family 36 (proton/amino acid symporter) (member 1 (SLC36A1) gene, ADAM metallopeptidase domain 19 (meltrin beta) (ADAM19) gene, cullin 7 (CUL7) gene, thyroglobulin (TG) gene, programmed cell death 1 ligand 2 (PDCD1LG2) gene, glutamate receptor (ionotropic (N-methyl D-aspartate-like 1A (GRINL1A) gene, mahogunin (ring finger 1 (MGRN1) gene, syntrophin (beta 2 (dystrophin-associated protein A1 (59 kDa (basic component 2) (SNTB2) gene, cyclin-dependent kinase 5 (regulatory subunit 1 (p35) (CDK5R1) gene, glucosidase (alpha; acid (GAA) gene, katanin p60 subunit A-like 2 (KATNAL2) gene, carcinoembryonic antigen-related cell adhesion molecule 4 (CEACAM4) gene, zinc finger protein 335 (ZNF335) gene, aspartate beta-hydroxylase domain containing 2 (ASPHD2) gene, acidic repeat containing (ACRC) gene, butyrophilin-like 3/butyrophilin-like 8 (BTNL3, BTLN8) gene, Moloney leukemia virus 10 homolog (mouse) (MOV10) gene, mediator complex subunit 12-like (MED12L) gene, kelch-like 6 (Drosophila) (KLHL6) gene, PDZ and LIM domain 5 (PDLIM5) gene, UDP-N-acetyl-alpha-D-galactosamine:polypeptide N-acetylgalactosaminyltransferase 10 (GALNT10) gene, secernin 1 (SCRN1) gene, vesicular (overexpressed in cancer (prosurvival protein 1 (VOPP1, RP11-289I10.2) gene, FK506 binding protein 9, 63 kDa (FKBP9, FKBP9, FKBP9L, AC091812.2) gene, kinesin family member 27 (KIF27) gene, piwi-like 4 (Drosophila) (PIWIL4) gene, telomerase-associated protein 1 (TEP1) gene, GTP cyclohydrolase 1, (GCH1) gene, proline rich 11, (PRR11) gene, cadherin 2, type 1, N-cadherin (neuronal) (CDH2) gene, protein phosphatase 1B-like (FLJ40125, AC138534.1) (PPM1N) gene, related RAS viral (r-ras) oncogene homolog, (RRAS) gene, dolichyl-diphosphooligosaccharide-protein glycosyltransferase, (DDOST) gene, anterior pharynx defective 1 homolog A (C. elegans) (APH1A) gene, tubulin tyrosine ligase (TTL) gene, testis expressed 261, (TEX261) gene, coenzyme Q2 homolog, prenyltransferase (yeast) (COQ2) gene, FCH and double SH3 domains 1, (FCHSD1) gene, BCL2-antagonist/killer 1, (BAK1) gene, solute carrier family 25 (mitochondrial carrier; phosphate carrier) member 25, (SLC25A25) gene, RELT tumor necrosis factor receptor, (RELT) gene, acid phosphatase 2, lysosomal, (ACP2) gene, TBC1 domain family, member 2B, (TBC1D2B) gene, Fanconi anemia, complementation group A, (FANCA) gene, solute carrier family 39 (metal ion transporter) member 11, (SLC39A11) gene.

3. A method according to claim 1, comprising: comparing the level of at least one IRC marker transcript to the level of a corresponding IRC marker transcript, wherein the IRC marker transcript is selected from the group consisting of: (a) a polynucleotide comprising a nucleotide sequence that shares at least 80% (or at least 81% to at least 99% and all integer percentages in between) sequence identity with the sequence set forth in any one of SEQ ID NO: 1, 3, 5, 7, 9, 11, 13, 15, 17, 19, 21, 23, 25, 27, 29, 31, 33, 35, 37, 39, 41, 43, 45, 47, 49, 51, 53, 55, 57, 59, 61, 63, 65, 67, 69, 71, 73, 75, 77, 79, 81, 83, 85, 87, 89, 91, 93, 95, 97, 99, 101, 103, 105, 107, 109, 111, 113, 115, 117, 119, 121, 123, 125, 127, 129, 131, 133, 135, 137, 139, 141, 143, 145, 147, 149, 151, 153, 155, 157, 159, 161, 163, 165, 167, 169, 171, 173, 175, 177, 179, 181, 183, 185, 187, 189, 191, 193, 195, 197, 199, 201, 203, 205, 207, 209, 211, 213, 215, 217, 219, 221, 223, 225, 227, 229, 231, 233, 235, 237, 239, 241, 243, 245, 247, 249, 251, 253, 255, 257, 259, 261, 263, 265, 267, 269, 271, 273, 275, 277, 279, 281, 283, 285, 287, 289, 291, 293, 295, 297, 299, 301, 303, 305, 307, 309, 311, 313, 315, 317, 319, 321, 323, 325, 327, 329, 331, 333, 335, 337, 339, 341, 343, 345, 347, 349, 351, 353, 355, 357, 359, 361, 363, 365, 367, 369, 371, 373, 375, 377, 379, 381, 383, 385, 387, 389, 391, 393, 395, 397, 399, 401, 403, 405, 407, 409, 411, 413, 415, 417, 419, 421, 423, 425, 427, 429, 431, 433, 435, 437, 439, 441, 443, 445, 447, 449, 451, 453, 455, 457, 459, 461, 463, 465, 467, 469, 471, 473, 475, 477, 479, 481, 483, 485, 487, 489, 491, 493, 495, 497, 499, 501, 503, 505, 507, 509, 511, 513 or 515, or a complement thereof; (b) a polynucleotide comprising a nucleotide sequence that encodes a polypeptide comprising the amino acid sequence set forth in any one of SEQ ID NO: 2, 4, 6, 8, 10, 12, 14, 16, 18, 20, 22, 24, 26, 28, 30, 32, 34, 36, 38, 40, 42, 44, 46, 48, 50, 52, 54, 56, 58, 60, 62, 64, 66, 68, 70, 72, 74, 76, 78, 80, 82, 84, 86, 88, 90, 92, 94, 96, 98, 100, 102, 104, 106, 108, 110, 112, 114, 116, 118, 120, 122, 124, 126, 128, 130, 132, 134, 136, 138, 140, 142, 144, 146, 148, 150, 152, 154, 156, 158, 160, 162, 164, 166, 168, 170, 172, 174, 176, 178, 180, 182, 184, 186, 188, 190, 192, 194, 196, 198, 200, 202, 204, 206, 208, 210, 212, 214, 216, 218, 220, 222, 224, 226, 228, 230, 232, 234, 236, 238, 240, 242, 244, 246, 248, 250, 252, 254, 256, 258, 260, 262, 264, 266, 268, 270, 272, 274, 276, 278, 280, 282, 284, 286, 288, 290, 292, 294, 296, 298, 300, 302, 304, 306, 308, 310, 312, 314, 316, 318, 320, 322, 324, 326, 328, 330, 332, 334, 336, 338, 340, 342, 344, 346, 348, 350, 352, 354, 356, 358, 360, 362, 364, 366, 368, 370, 372, 374, 376, 378, 380, 382, 384, 386, 388, 390, 392, 394, 396, 398, 400, 402, 404, 406, 408, 410, 412, 414, 416, 418, 420, 422, 424, 426, 428, 430, 432, 434, 436, 438, 440, 442, 444, 446, 448, 450, 452, 454, 456, 458, 460, 462, 464, 466, 468, 470, 472, 474, 476, 478, 480, 482, 484, 486, 488, 490, 492, 494, 496, 498, 500, 502, 504, 506, 508, 510, 512, 514 or 516; (c) a polynucleotide comprising a nucleotide sequence that encodes a polypeptide that shares at least 80% (or at least 81% to at least 99% and all integer percentages in between) sequence similarity or identity with at least a portion of the sequence set forth in SEQ ID NO: 2, 4, 6, 8, 10, 12, 14, 16, 18, 20, 22, 24, 26, 28, 30, 32, 34, 36, 38, 40, 42, 44, 46, 48, 50, 52, 54, 56, 58, 60, 62, 64, 66, 68, 70, 72, 74, 76, 78, 80, 82, 84, 86, 88, 90, 92, 94, 96, 98, 100, 102, 104, 106, 108, 110, 112, 114, 116, 118, 120, 122, 124, 126, 128, 130, 132, 134, 136, 138, 140, 142, 144, 146, 148, 150, 152, 154, 156, 158, 160, 162, 164, 166, 168, 170, 172, 174, 176, 178, 180, 182, 184, 186, 188, 190, 192, 194, 196, 198, 200, 202, 204, 206, 208, 210, 212, 214, 216, 218, 220, 222, 224, 226, 228, 230, 232, 234, 236, 238, 240, 242, 244, 246, 248, 250, 252, 254, 256, 258, 260, 262, 264, 266, 268, 270, 272, 274, 276, 278, 280, 282, 284, 286, 288, 290, 292, 294, 296, 298, 300, 302, 304, 306, 308, 310, 312, 314, 316, 318, 320, 322, 324, 326, 328, 330, 332, 334, 336, 338, 340, 342, 344, 346, 348, 350, 352, 354, 356, 358, 360, 362, 364, 366, 368, 370, 372, 374, 376, 378, 380, 382, 384, 386, 388, 390, 392, 394, 396, 398, 400, 402, 404, 406, 408, 410, 412, 414, 416, 418, 420, 422, 424, 426, 428, 430, 432, 434, 436, 438, 440, 442, 444, 446, 448, 450, 452, 454, 456, 458, 460, 462, 464, 466, 468, 470, 472, 474, 476, 478, 480, 482, 484, 486, 488, 490, 492, 494, 496, 498, 500, 502, 504, 506, 508, 510, 512, 514 or 516; (d) a polynucleotide expression product comprising a nucleotide sequence that hybridizes to the sequence of (a), (b), (c) or a complement thereof, under at least medium or high stringency conditions.

4. A method according to claim 1, comprising: comparing the level of at least one IRC marker polypeptide to the level of a corresponding IRC marker polypeptide, wherein the IRC marker polypeptide is selected from the group consisting of: (i) a polypeptide comprising the amino acid sequence set forth in any one of SEQ ID NO: 2, 4, 6, 8, 10, 12, 14, 16, 18, 20, 22, 24, 26, 28, 30, 32, 34, 36, 38, 40, 42, 44, 46, 48, 50, 52, 54, 56, 58, 60, 62, 64, 66, 68, 70, 72, 74, 76, 78, 80, 82, 84, 86, 88, 90, 92, 94, 96, 98, 100, 102, 104, 106, 108, 110, 112, 114, 116, 118, 120, 122, 124, 126, 128, 130, 132, 134, 136, 138, 140, 142, 144, 146, 148, 150, 152, 154, 156, 158, 160, 162, 164, 166, 168, 170, 172, 174, 176, 178, 180, 182, 184, 186, 188, 190, 192, 194, 196, 198, 200, 202, 204, 206, 208, 210, 212, 214, 216, 218, 220, 222, 224, 226, 228, 230, 232, 234, 236, 238, 240, 242, 244, 246, 248, 250, 252, 254, 256, 258, 260, 262, 264, 266, 268, 270, 272, 274, 276, 278, 280, 282, 284, 286, 288, 290, 292, 294, 296, 298, 300, 302, 304, 306, 308, 310, 312, 314, 316, 318, 320, 322, 324, 326, 328, 330, 332, 334, 336, 338, 340, 342, 344, 346, 348, 350, 352, 354, 356, 358, 360, 362, 364, 366, 368, 370, 372, 374, 376, 378, 380, 382, 384, 386, 388, 390, 392, 394, 396, 398, 400, 402, 404, 406, 408, 410, 412, 414, 416, 418, 420, 422, 424, 426, 428, 430, 432, 434, 436, 438, 440, 442, 444, 446, 448, 450, 452, 454, 456, 458, 460, 462, 464, 466, 468, 470, 472, 474, 476, 478, 480, 482, 484, 486, 488, 490, 492, 494, 496, 498, 500, 502, 504, 506, 508, 510, 512, 514 or 516; and (ii) a polypeptide comprising an amino acid sequence that shares at least 80% (or at least 81% to at least 99% and all integer percentages in between) sequence similarity or identity with the sequence set forth in any one of SEQ ID NO: 2, 4, 6, 8, 10, 12, 14, 16, 18, 20, 22, 24, 26, 28, 30, 32, 34, 36, 38, 40, 42, 44, 46, 48, 50, 52, 54, 56, 58, 60, 62, 64, 66, 68, 70, 72, 74, 76, 78, 80, 82, 84, 86, 88, 90, 92, 94, 96, 98, 100, 102, 104, 106, 108, 110, 112, 114, 116, 118, 120, 122, 124, 126, 128, 130, 132, 134, 136, 138, 140, 142, 144, 146, 148, 150, 152, 154, 156, 158, 160, 162, 164, 166, 168, 170, 172, 174, 176, 178, 180, 182, 184, 186, 188, 190, 192, 194, 196, 198, 200, 202, 204, 206, 208, 210, 212, 214, 216, 218, 220, 222, 224, 226, 228, 230, 232, 234, 236, 238, 240, 242, 244, 246, 248, 250, 252, 254, 256, 258, 260, 262, 264, 266, 268, 270, 272, 274, 276, 278, 280, 282, 284, 286, 288, 290, 292, 294, 296, 298, 300, 302, 304, 306, 308, 310, 312, 314, 316, 318, 320, 322, 324, 326, 328, 330, 332, 334, 336, 338, 340, 342, 344, 346, 348, 350, 352, 354, 356, 358, 360, 362, 364, 366, 368, 370, 372, 374, 376, 378, 380, 382, 384, 386, 388, 390, 392, 394, 396, 398, 400, 402, 404, 406, 408, 410, 412, 414, 416, 418, 420, 422, 424, 426, 428, 430, 432, 434, 436, 438, 440, 442, 444, 446, 448, 450, 452, 454, 456, 458, 460, 462, 464, 466, 468, 470, 472, 474, 476, 478, 480, 482, 484, 486, 488, 490, 492, 494, 496, 498, 500, 502, 504, 506, 508, 510, 512, 514 or 516.

5. A method according to any one of claims 1 to 4, comprising: (1) measuring in a biological sample obtained from the subject the level of the at least one IRC marker expression product and (2) comparing the measured level of each IRC marker expression product to the level of a corresponding IRC marker expression product in a reference sample obtained from the at least one control subject.

6. A method according to any one of claims 1 to 5, comprising: assessing whether the subject has, or is at risk of developing, one of the plurality of conditions when the measured level of the or each IRC marker expression product is different than the measured level of the or each corresponding IRC marker expression product.

7. A method according to claim 6, wherein the level of an individual IRC marker expression product is at least 110% of the level of an individual corresponding IRC expression product.

8. A method according to claim 6, wherein the level of an individual IRC marker expression product is no more than about 95% of the level of an individual corresponding IRC expression product.

9. A method according to any one of claims 1 to 6 or 8, wherein the presence or risk of development of sepsis is determined by detecting in the subject a decrease in the level of at least 1, 2, 3, 4, 5, 6, 7, 8, 9, 10, 11, 12, 13, 14, 15, 16, 17, 18, 19, 20, 21, 22, 23, 24, 25, 26, 27, 28, 29, 30, 31, 32, 33, 34, 35, 36, 37, 38, 39, 40, 41, 42, 43, 44, 45, 46, 47 or 48 IRC marker expression products from a multi-transcript-producing gene selected from the group consisting of KIF27, OTX1, CDK5R1, FKBP9, CDH2, ADAM19, BTNL8/3 and PANX2 (hereafter referred to as “LIST A”), as compared to the level of a corresponding IRC marker expression product(s) in a post-surgical inflammation-positive control subject.

10. A method according to any one of claims 1 to 7, wherein the presence or risk of development of post-surgical inflammation is determined by detecting in the subject an increase in the level of at least 1, 2, 3, 4, 5, 6, 7, 8, 9, 10, 11, 12, 13, 14, 15, 16, 17, 18, 19, 20, 21, 22, 23, 24, 25, 26, 27, 28, 29, 30, 31, 32, 33, 34, 35, 36, 37, 38, 39, 40, 41, 42, 43, 44, 45, 46, 47 or 48 IRC marker expression product(s) from at least one multi-transcript-producing gene selected from the group consisting of: KIF27, OTX1, CDK5R1, FKBP9, CDH2, ADAM19, BTNL8/3 and PANX2 (i.e., LIST A), as compared to the level of a corresponding IRC marker expression product in a sepsis control subject.

11. A method according to claim 9 or claim 10, wherein the KIF27 IRC marker expression product comprises a nucleotide sequence corresponding to KIF27 exons 4 and 7 or an amino acid sequence encoded by that exon.

12. A method according to claim 11, wherein the KIF27 IRC marker expression product is a KIF27 IRC marker transcript as set forth in any one of SEQ ID NO: 1, 3, 5, 7, or 9.

13. A method according to claim 11, wherein the KIF271 IRC marker expression product is a KIF27 IRC marker polypeptide as set forth in any one of SEQ ID NO: 2, 4, 6, 8, or 10.

14. A method according to claim 9 or claim 10, wherein the OTX1 IRC marker expression product comprises a nucleotide sequence corresponding to OTX1 exon 5 or an amino acid sequence encoded by that exon.

15. A method according to claim 14, wherein the OTX1 IRC marker expression product is an OTX1 IRC marker transcript as set forth in any one of SEQ ID NO: 11 or 13.

16. A method according to claim 14, wherein the OTX1 IRC marker expression product is an OTX1 IRC marker polypeptide as set forth in any one of SEQ ID NO:12 or 14.

17. A method according to claim 9 or claim 10, wherein the CDK5R1 IRC marker expression product comprises a nucleotide sequence corresponding to CDK5R1 exon 2 or an amino acid sequence encoded by that exon.

18. A method according to claim 17, wherein the CDK5R1 IRC marker expression product is a CDK5R1 IRC marker transcript as set forth in any one of SEQ ID NO: 15.

19. A method according to claim 17, wherein the CDK5R1 IRC marker expression product is a CDK5R1 IRC marker polypeptide as set forth in any one of SEQ ID NO: 16.

20. A method according to claim 9 or claim 10, wherein the FKBP9 IRC marker expression product comprises a nucleotide sequence corresponding to FKBP9 exon 10 or an amino acid sequence encoded by that exon.

21. A method according to claim 20, wherein the IRC marker expression product is an FKBP9 IRC marker transcript as set forth in any one of SEQ ID NO: 17.

22. A method according to claim 20, wherein the FKBP9 IRC marker expression product is an FKBP9 IRC marker polypeptide as set forth in any one of SEQ ID NO: 18.

23. A method according to claim 9 or claim 10, wherein the CDH2 IRC marker expression product comprises a nucleotide sequence corresponding to CDH2 exon 10 or an amino acid sequence encoded by that exon.

24. A method according to claim 23, wherein the CDH2 IRC marker expression product is a CDH2 IRC marker transcript as set forth in any one of SEQ ID NO: 19 and 21.

25. A method according to claim 23, wherein the CDH2 IRC marker expression product is a CDH2 IRC marker polypeptide as set forth in any one of SEQ ID NO:19 and 21.

26. A method according to claim 9 or claim 10, wherein the ADAM19 IRC marker expression product comprises a nucleotide sequence corresponding to ADAM19 exon 10 or an amino acid sequence encoded by that exon.

27. A method according to claim 26, wherein the ADAM19 IRC marker expression product is an ADAM 19 IRC marker transcript as set forth in any one of SEQ NO: 23, 25, 27 and 29.

28. A method according to claim 26, wherein the ADAM19 IRC marker expression product is an ADAM19 IRC marker polypeptide as set forth in any one of SEQ ID NO:24, 26, 28 and 30.

29. A method according to claim 9 or claim 10, wherein the BTNL8/3 IRC marker expression product comprises a nucleotide sequence corresponding to BTNL8/3 exon 6 or an amino acid sequence encoded by that exon.

30. A method according to claim 29, wherein the BTNL8/3 IRC marker expression product is a BTNL8/3IRC marker transcript as set forth in any one of SEQ ID NO: 31, 33, 35, 37, 39 and 41.

31. A method according to claim 29, wherein the BTNL8/3 IRC marker expression product is a BTNL8/3 IRC marker polypeptide as set forth in any one of SEQ ID NO: 32, 34, 36, 38, 40 and 42.

32. A method according to claim 9 or claim 10, wherein the PANX2 IRC marker expression product comprises a nucleotide sequence corresponding to an exon selected from PANX2 exon 1 and exon 2, or an amino acid sequence encoded by that exon.

33. A method according to claim 32, wherein the PANX2 IRC marker expression product is a PANX2 IRC transcript as set forth in any one of SEQ ID NO: 43, 45 or 47.

34. A method according to claim 32, wherein the PANX2 IRC marker expression product is a PANX2 IRC polypeptide as set forth in any one of SEQ ID NO:44, 46 or 48.

35. A method according to any one of claims 1 to 7, wherein the presence or risk of development of sepsis is determined by detecting in the subject an increase in the level of at least 1, 2, 3, 4, 5, 6, 7, 8, 9, 10, 11, 12, 13, 14, 15, 16, 17, 18, 19, 20, 21, 22, 23, 24, 25, 26, 27, 28, 29, 30, 31, 32, 33, 34, 35, 36, 37, 38, 39, 40, 41, 42, 43, 44, 45, 46, 47, 48, 49, 50, 51, 52, 53, 54, 55, 56, 57, 58, 59, 60, 61, 62, 63, 64, 65, 66, 67, 68, 69, 70, 71, 72, 73, 74, 75, 76, 77, 78, 79, 80, 81, 82, 83, 84, 85, 86, 87, 88, 89, 90, 91, 92, 93, 94, 95, 96, 97, 98, 99, 100, 101, 102, 103, 104, 105, 106, 107, 108, 109, 110, 111, 112, 113, 114, 115, 116, 117, 118, 119, 120, 121, 122, 123, 124, 125, 126, 127, 128, 129, 130, 131, 132, 133, 134, 135, 136, 137, 138, 139, 140, 141, 142, 143, 144, 145, 146, 147, 148, 149, 150, 151, 152, 153, 154, 155, 156, 157 or 158 IRC marker expression product(s) from at least one multi-transcript-producing gene selected from the group consisting of: PDLIM5, SCRN1, ASPHD2, VOPP1, ACRC, GALNT10, AC1385341, MED12L, RHBDF2, KLHL6, TEP1, PIWIL6, PRR1, RRAS, TG, ANKDD1A, GABRR2, MOV10, SLAMF7, PDCDILG2 and GCH1 (hereafter referred to as “LIST B”), as compared to the level of a corresponding IRC marker expression product in a post-surgical-positive subject control subject.

36. A method according to any one of claims 1 to 6, or 8, wherein the presence or risk of development of post-surgical inflammation is determined by detecting in the subject a decrease in the level of at least 1, 2, 3, 4, 5, 6, 7, 8, 9, 10, 11, 12, 13, 14, 15, 16, 17, 18, 19, 20, 21, 22, 23, 24, 25, 26, 27, 28, 29, 30, 31, 32, 33, 34, 35, 36, 37, 38, 39, 40, 41, 42, 43, 44, 45, 46, 47, 48, 49, 50, 51, 52, 53, 54, 55, 56, 57, 58, 59, 60, 61, 62, 63, 64, 65, 66, 67, 68, 69, 70, 71, 72, 73, 74, 75, 76, 77, 78, 79, 80, 81, 82, 83, 84, 85, 86, 87, 88, 89, 90, 91, 92, 93, 94, 95, 96, 97, 98, 99, 100, 101, 102, 103, 104, 105, 106, 107, 108, 109, 110, 111, 112, 113, 114, 115, 116, 117, 118, 119, 120, 121, 122, 123, 124, 125, 126, 127, 128, 129, 130, 131, 132, 133, 134, 135, 136, 137, 138, 139, 140, 141, 142, 143, 144, 145, 146, 147, 148, 149, 150, 151, 152, 153, 154, 155, 156, 157 or 158 IRC marker expression product(s) from at least one multi-transcript-producing gene selected from the group consisting of PDLIM5, SCRN1, ASPHD2, VOPP1, ACRC, GALNT10, AC1385341, MED12L, RHBDF2, KLHL6, TEP1, PIWIL6, PRR1, RRAS, TG, ANKDD1A, GABRR2, MOV10, SLAMF7, PDCDILG2 and GCH1 (i.e., LIST B), as compared to the level of a corresponding IRC marker expression product in a sepsis control subject.

37. A method according to claim 35 or claim 36, wherein the PDLIM5 IRC marker expression product comprises a nucleotide sequence corresponding to PDLIM5 exon 5 or an amino acid sequence encoded by that exon.

38. A method according to claim 37, wherein the PDLIM5 IRC marker expression product is a PDLIM5 IRC transcript as set forth in any one of SEQ ID NO: 49.

39. A method according to claim 37, wherein the PDLIM5 IRC marker expression product is a PDLIM5 IRC polypeptide as set forth in any one of SEQ ID NO: 50.

40. A method according to claim 35 or claim 36, wherein the SCRN1 IRC marker expression product comprises a nucleotide sequence corresponding to SCRN1 exon 5 or an amino acid sequence encoded by that exon.

41. A method according to claim 40, wherein the SCRN1 IRC marker expression product is a SCRN1 IRC transcript as set forth in any one of SEQ ID NO: 51, 53, 55, 57, 59, 61 or 63.

42. A method according to claim 40, wherein the SCRN1 IRC marker expression product is a SCRN1 IRC polypeptide as set forth in any one of SEQ ID NO: 52, 54, 56, 58, 60, 62 or 64.

43. A method according to claim 35 or claim 36, wherein the ASPHD2 IRC marker expression product comprises a nucleotide sequence corresponding to ASPHD2 exon 4 or an amino acid sequence encoded by that exon.

44. A method according to claim 43, wherein the ASPHD2 IRC marker expression product is an ASPHD2 IRC transcript as set forth in any one of SEQ ID NO:65, 67 or 69.

45. A method according to claim 43, wherein the ASPHD2 IRC marker expression product is an ASPHD2 IRC polypeptide as set forth in any one of SEQ ID NO:66, 68 or 70.

46. A method according to claim 35 or claim 36, wherein the VOPP1 IRC marker expression product comprises a nucleotide sequence corresponding to VOPP1 exon 3 or an amino acid sequence encoded by that exon.

47. A method according to claim 46, wherein the VOPP1 IRC marker expression product is a VOPP1 IRC transcript as set forth in any one of SEQ ID NO: 71, 73, 75, 77, 79, 81, 83, 85, 87, 89, 91 or 93.

48. A method according to claim 46, wherein the VOPP1 IRC marker expression product is a VOPP1 IRC polypeptide as set forth in any one of SEQ ID NO: 72, 74, 76, 78, 80, 82, 84, 86, 88, 90, 92 or 94.

49. A method according to claim 35 or claim 36, wherein the ACRC IRC marker expression product comprises a nucleotide sequence corresponding to ACRC exons 3 and 5 or an amino acid sequence encoded by that exon.

50. A method according to claim 49, wherein the ACRC IRC marker expression product is an ACRC IRC transcript as set forth in any one of SEQ ID NO:95 or 97.

51. A method according to claim 49, wherein the ACRC IRC marker expression product is an ACRC IRC polypeptide as set forth in any one of SEQ ID NO:96 or 98.

52. A method according to claim 35 or claim 36, wherein the GALNT10 IRC marker expression product comprises a nucleotide sequence corresponding to GALNT10 exon 6 or an amino acid sequence encoded by that exon.

53. A method according to claim 52, wherein the GALNT10 IRC marker expression product is a GALNT10 IRC transcript as set forth in any one of SEQ ID NO:99 or 101.

54. A method according to claim 52, wherein the GALNT10 IRC marker expression product is a GALNT10 IRC polypeptide as set forth in any one of SEQ ID NO:100 or 102.

55. A method according to claim 35 or claim 36, wherein the PPM1N IRC marker expression product comprises a nucleotide sequence corresponding to PPM1N exon 3 or an amino acid sequence encoded by that exon.

56. A method according to claim 55, wherein the PPM1N IRC marker expression product is a PPM1N IRC transcript as set forth in any one of SEQ ID NO: 107, 109, 111, 113, 115, 117, 119, 121 or 123.

57. A method according to claim 55, wherein the PPM1N IRC marker expression product is a PPM1N IRC polypeptide as set forth in any one of SEQ ID NO: 108, 110, 112, 114, 116, 118, 120, 122, or 124.

58. A method according to claim 35 or claim 36, wherein the MED12L IRC marker expression product comprises a nucleotide sequence corresponding to MED12L exon 17 or an amino acid sequence encoded by that exon.

59. A method according to claim 58, wherein the MED12L IRC marker expression product is a MED12L IRC transcript as set forth in any one of SEQ ID NO: 125 or 127.

60. A method according to claim 58, wherein the MED12L IRC marker expression product is a MED12L IRC polypeptide as set forth in any one of SEQ ID NO:126 or 128.

61. A method according to claim 35 or claim 36, wherein the RHBDF2 IRC marker expression product comprises a nucleotide sequence corresponding to RHBDF2 exons 6, 9, 10, 11, 14, 17, 18 or 19 or an amino acid sequence encoded by that exon.

62. A method according to claim 61, wherein the RHBDF2 IRC marker expression product is an RHBDF2 IRC transcript as set forth in any one of SEQ ID NO: 129, 131 or 133.

63. A method according to claim 61, wherein the RHBDF2 IRC marker expression product is an RHBDF2 IRC polypeptide as set forth in any one of SEQ ID NO:130, 132 or 134.

64. A method according to claim 35 or claim 36, wherein the KLHL6 IRC marker expression product comprises a nucleotide sequence corresponding to KLHL6 exon 7 or an amino acid sequence encoded by that exon.

65. A method according to claim 64, wherein the KLHL6 IRC marker expression product is a KLHL6 IRC transcript as set forth in any one of SEQ ID NO: 135.

66. A method according to claim 64, wherein the KLHL6 IRC marker expression product is a KLHL6 IRC polypeptide as set forth in any one of SEQ ID NO:136.

67. A method according to claim 35 or claim 36, wherein the TEP1 IRC marker expression product comprises a nucleotide sequence corresponding to TEP1 exon 49 or an amino acid sequence encoded by that exon.

68. A method according to claim 67, wherein the TEP1 IRC marker expression product is a TEP1 IRC transcript as set forth in any one of SEQ ID NO: 137 or 139.

69. A method according to claim 67, wherein the TEP1 IRC marker expression product is a TEP1 IRC polypeptide as set forth in any one of SEQ ID NO:138 or 140.

70. A method according to claim 35 or claim 36, wherein the PIWIL4 IRC marker expression product comprises a nucleotide sequence corresponding to PIWIL4 exons 2 and 14 or an amino acid sequence encoded by that exon.

71. A method according to claim 70, wherein the PIWIL4 IRC marker expression product is a PIWIL4 IRC transcript as set forth in any one of SEQ ID NO: 141 or 143.

72. A method according to claim 70, wherein the PIWIL4 IRC marker expression product is a PIWIL4 IRC polypeptide as set forth in any one of SEQ ID NO:142 or 144.

73. A method according to claim 35 or claim 36, wherein the PRR11 IRC marker expression product comprises a nucleotide sequence corresponding to PRR11 exons 4 and 5 or an amino acid sequence encoded by that exon.

74. A method according to claim 73, wherein the PRR11 IRC marker expression product is a PRR11 IRC transcript as set forth in any one of SEQ ID NO: 145.

75. A method according to claim 73, wherein the PRR11 IRC marker expression product is a PRR11 IRC polypeptide as set forth in any one of SEQ ID NO:146.

76. A method according to claim 35 or claim 36, wherein the RRAS IRC marker expression product comprises a nucleotide sequence corresponding to RRAS exon 1 or an amino acid sequence encoded by that exon.

77. A method according to claim 76, wherein the RRAS IRC marker expression product is an RRAS IRC transcript as set forth in any one of SEQ ID NO: 147.

78. A method according to claim 76, wherein the RRAS IRC marker expression product is an RRAS IRC polypeptide as set forth in any one of SEQ ID NO:148.

79. A method according to claim 35 or claim 36, wherein the TG IRC marker expression product comprises a nucleotide sequence corresponding to TG exon 6 or an amino acid sequence encoded by that exon.

80. A method according to claim 79, wherein the TG IRC marker expression product is a TG IRC transcript as set forth in any one of SEQ ID NO: 149 or 151.

81. A method according to claim 79, wherein the TG IRC marker expression product is a TG IRC polypeptide as set forth in any one of SEQ ID NO:150 or 152.

82. A method according to claim 35 or claim 36, wherein the ANKDD1A IRC marker expression product comprises a nucleotide sequence corresponding to ANKDD1A exon 7 or an amino acid sequence encoded by that exon.

83. A method according to claim 82, wherein the ANKDD1A IRC marker expression product is an ANKDD1A IRC transcript as set forth in any one of SEQ ID NO: 153, 155, 157, 159 or 161.

84. A method according to claim 82, wherein the ANKDD1A IRC marker expression product is an ANKDD1A IRC polypeptide as set forth in any one of SEQ ID NO:154, 156, 158, 160 or 162.

85. A method according to claim 35 or claim 36, wherein the GABRR2 IRC marker expression product comprises a nucleotide sequence corresponding to GABRR2 exons 7, 8 or 9 or an amino acid sequence encoded by that exon.

86. A method according to claim 85, wherein the GABRR2 IRC marker expression product is an GABRR2 IRC transcript as set forth in any one of SEQ ID NO: 163 or 165.

87. A method according to claim 85, wherein the GABRR2 IRC marker expression product is an GABRR2 IRC polypeptide as set forth in any one of SEQ ID NO:164 or 166.

88. A method according to claim 35 or claim 36, wherein the MOV10 IRC marker expression product comprises a nucleotide sequence corresponding to MOV10 exon 6 or an amino acid sequence encoded by that exon.

89. A method according to claim 88, wherein the MOV10 IRC marker expression product is a MOV10 IRC transcript as set forth in any one of SEQ ID NO: 167, 169, 171, 173, 175 or 177.

90. A method according to claim 85, wherein the MOV10 IRC marker expression product is a MOV10 IRC polypeptide as set forth in any one of SEQ ID NO:168, 170, 172, 174, 176 or 178.

91. A method according to claim 35 or claim 36, wherein the SLAMF7 IRC marker expression product comprises a nucleotide sequence corresponding to SLAMF7 exons 2, 3, 4 or 5 or an amino acid sequence encoded by that exon.

92. A method according to claim 91, wherein the SLAMF7 IRC marker expression product is a SLAMF7 IRC transcript as set forth in any one of SEQ ID NO: 179, 181, 183, 185, 187, 189, 191 or 193.

93. A method according to claim 91, wherein the SLAMF7 IRC marker expression product is a SLAMF7 IRC polypeptide as set forth in any one of SEQ ID NO:180, 182, 184, 186, 188, 190, 192 or 194.

94. A method according to claim 35 or claim 36, wherein the PDCD1LG2 IRC marker expression product comprises a nucleotide sequence corresponding to PDCD1LG2 exons 1 or 2 or an amino acid sequence encoded by that exon.

95. A method according to claim 94, wherein the PDCD1LG2 IRC marker expression product is a PDCD1LG2 IRC transcript as set forth in any one of SEQ ID NO:195 or 197.

96. A method according to claim 94, wherein the PDCD1LG2 IRC marker expression product is a PDCD1LG2 IRC polypeptide as set forth in any one of SEQ ID NO: 196 or 198.

97. A method according to claim 35 or claim 36, wherein the GCH1 RC marker expression product comprises a nucleotide sequence corresponding to GCH1 exon 2 or an amino acid sequence encoded by that exon.

98. A method according to claim 97, wherein the GCH1 IRC marker expression product is a GCH1 IRC transcript as set forth in any one of SEQ ID NO:199, 201, 203 or 205.

99. A method according to claim 97, wherein the GCH1 IRC marker expression product is a GCH1 IRC polypeptide as set forth in any one of SEQ ID NO: 200, 202, 204 or 206.

100. A method according to any one of claims 1 to 7, wherein the presence or risk of development of sepsis is determined by detecting in the subject an increase in the level of at least 1, 2, 3, 4, 5, 6, 7, 8, 9, 10, 11, 12, 13, 14, 15, 16, 17, 18, 19, 20, 21, 22, 23, 24, 25, 26, 27, 28, 29, 30, 31, 32, 33, 34, 35, 36, 37, 38, 39, 40, 41, 42, 43, 44, 45, 46, 47, 48, 49, 50, 51, 52, 53, 54, 55, 56, 57, 58, 59, 60, 61, 62, 63, 64, 65, 66, 67, 68, 69, 70, 71, 72, 73, 74, 75, 76, 77, 78, 79, 80, 81, 82, 83, 84, 85, 86, 87, 88, 89, 90, 91, 92, 93, 94, 95, 96, 97, 98, 99, 100, 101, 102, 103, 104, 105, 106, 107, 108, 109, 110, 111, 112, 113, 114, 115, 116, 117, 118, 119, 120, 121, 122, 123, 124, 125, 126, 127, 128, 129, 130, 131, 132, 133, 134, 135, 136, 137, 138, 139, 140, 141, 142, 143, 144, 145, 146, 147, 148, 149, 150, 151, 152, 153, 154, 155 or 156 IRC marker expression product(s) from at least one multi-transcript-producing gene selected from the group consisting of: RELT, ACP2, FCHSD1, CLPB, SLC39A1, TBC1D2B, APH1A, DDOST, BAK1, SLC25A25A, COQ2, FANCA, PIWIL4, ZNF335, TEX261, GABRR2, VOPP1, TTL, CES2, GALNT10, CQORF91, AMBRA1 and SCRN1 (hereafter referred to as “LIST C”), as compared to the level of a corresponding IRC marker expression product in an inSIRS-positive control subject.

101. A method according to any one of claims 1 to 6, or 8, wherein the presence or risk of development of inSIRS is determined by detecting in the subject a decrease in the level of at least 1, 2, 3, 4, 5, 6, 7, 8, 9, 10, 11, 12, 13, 14, 15, 16, 17, 18, 19, 20, 21, 22, 23, 24, 25, 26, 27, 28, 29, 30, 31, 32, 33, 34, 35, 36, 37, 38, 39, 40, 41, 42, 43, 44, 45, 46, 47, 48, 49, 50, 51, 52, 53, 54, 55, 56, 57, 58, 59, 60, 61, 62, 63, 64, 65, 66, 67, 68, 69, 70, 71, 72, 73, 74, 75, 76, 77, 78, 79, 80, 81, 82, 83, 84, 85, 86, 87, 88, 89, 90, 91, 92, 93, 94, 95, 96, 97, 98, 99, 100, 101, 102, 103, 104, 105, 106, 107, 108, 109, 110, 111, 112, 113, 114, 115, 116, 117, 118, 119, 120, 121, 122, 123, 124, 125, 126, 127, 128, 129, 130, 131, 132, 133, 134, 135, 136, 137, 138, 139, 140, 141, 142, 143, 144, 145, 146, 147, 148, 149, 150, 151, 152, 153, 154, 155 or 156 IRC marker expression(s) product from at least one multi-transcript-producing gene selected from the group consisting of: RELT, ACP2, FCHSD1, CLPB, SLC39A1, TBC1D2B, APH1A, DDOST, BAK1, SLC25A25A, COQ2, FANCA, PIWIL4, ZNF335, TEX261, GABRR2, VOPP1, TTL, CES2, GALNT10, CQORF91, AMBRA1 and SCRN1 (i.e., LIST C), as compared to the level of the corresponding IRC marker expression product in a sepsis-positive control subject.

102. A method according to claim 100 or claim 101, wherein the RELT IRC marker expression product comprises a nucleotide sequence corresponding to an exon selected from RELT exon 4, or an amino acid sequence encoded by that exon.

103. A method according to claim 102, wherein the RELT IRC marker expression product is a RELT IRC transcript as set forth in any one of SEQ ID NO: 207 or 209.

104. A method according to claim 102, wherein the RELT IRC marker expression product is a RELT IRC polypeptide as set forth in any one of SEQ ID NO: 208 or 210.

105. A method according to claim 100 or claim 101, wherein the ACP2 IRC marker expression product comprises a nucleotide sequence corresponding to an exon selected from ACP2 exon 7, or an amino acid sequence encoded by that exon.

106. A method according to claim 105, wherein the ACP2 IRC marker expression product is a ACP2 IRC transcript as set forth in any one of SEQ ID NO: 211.

107. A method according to claim 105, wherein the ACP2 IRC marker expression product is a ACP2 IRC polypeptide as set forth in any one of SEQ ID NO: 212.

108. A method according to claim 100 or claim 101, wherein the FCHSD1 IRC marker expression product comprises a nucleotide sequence corresponding to an exon selected from FCHSD1 exon 14, or an amino acid sequence encoded by that exon.

109. A method according to claim 108, wherein the FCHSD1 IRC marker expression product is a FCHSD1 IRC transcript as set forth in any one of SEQ ID NO: 213 or 215.

110. A method according to claim 108, wherein the FCHSD1 IRC marker expression product is a FCHSD1 IRC polypeptide as set forth in any one of SEQ ID NO: 214 or 216.

111. A method according to claim 100 or claim 101, wherein the CLPB IRC marker expression product comprises a nucleotide sequence corresponding to an exon selected from CLPB exon 10, or an amino acid sequence encoded by that exon.

112. A method according to claim 111, wherein the CLPB IRC marker expression product is a CLPB IRC transcript as set forth in any one of SEQ ID NO: 217, 219 or 221.

113. A method according to claim 111, wherein the CLPB IRC marker expression product is a CLPB IRC polypeptide as set forth in any one of SEQ ID NO: 218, 220 or 222.

114. A method according to claim 100 or claim 101, wherein the SLC39A11 IRC marker expression product comprises a nucleotide sequence corresponding to an exon selected from SLC39A11 exon 2, or an amino acid sequence encoded by that exon.

115. A method according to claim 114, wherein the SLC39A11 IRC marker expression product is a SLC39A11 IRC transcript as set forth in any one of SEQ ID NO: 223.

116. A method according to claim 114, wherein the SLC39A11 IRC marker expression product is a SLC39A11 IRC polypeptide as set forth in any one of SEQ ID NO: 224.

117. A method according to claim 100 or claim 101, wherein the TBC1D2B IRC marker expression product comprises a nucleotide sequence corresponding to an exon selected from TBC1D2B exon 13, or an amino acid sequence encoded by that exon.

118. A method according to claim 117, wherein the TBC1D2B IRC marker expression product is a TBC1D2B IRC transcript as set forth in any one of SEQ ID NO: 225, 227 or 229.

119. A method according to claim 117, wherein the TBC1D2B IRC marker expression product is a TBC1D2B IRC polypeptide as set forth in any one of SEQ ID NO: 226, 228 or 230.

120. A method according to claim 100 or claim 101, wherein the APH1A IRC marker expression product comprises a nucleotide sequence corresponding to an exon selected from APH1A exon 1, or an amino acid sequence encoded by that exon.

121. A method according to claim 120, wherein the APH1A IRC marker expression product is an APH1A IRC transcript as set forth in any one of SEQ ID NO: 231, 233, 235, 237, 239 or 241.

122. A method according to claim 120, wherein the APH1A IRC marker expression product is a APH1A IRC polypeptide as set forth in any one of SEQ ID NO: 232, 234, 236, 238, 240 or 242.

123. A method according to claim 100 or claim 101, wherein the DDOST IRC marker expression product comprises a nucleotide sequence corresponding to an exon selected from DDOST exon 2, or an amino acid sequence encoded by that exon.

124. A method according to claim 123, wherein the DDOST IRC marker expression product is a DDOST IRC transcript as set forth in any one of SEQ ID NO: 243.

125. A method according to claim 123, wherein the DDOST IRC marker expression product is a DDOST IRC polypeptide as set forth in any one of SEQ ID NO: 244.

126. A method according to claim 100 or claim 101, wherein the BAK1 IRC marker expression product comprises a nucleotide sequence corresponding to an exon selected from BAK1 exon 7, or an amino acid sequence encoded by that exon.

127. A method according to claim 126, wherein the BAK1 IRC marker expression product is a BAK1 IRC transcript as set forth in any one of SEQ ID NO: 245 or 247.

128. A method according to claim 126, wherein the BAK1 IRC marker expression product is a BAK1 IRC polypeptide as set forth in any one of SEQ ID NO: 246 or 248.

129. A method according to claim 100 or claim 101, wherein the SLC25A25A IRC marker expression product comprises a nucleotide sequence corresponding to an exon selected from SLC25A25A exon 10, or an amino acid sequence encoded by that exon.

130. A method according to claim 129, wherein the SLC25A25A IRC marker expression product is an SLC25A25A IRC transcript as set forth in any one of SEQ ID NO: 249, 251, 253, 255, 257, 259 or 261.

131. A method according to claim 129, wherein the SLC25A25A IRC marker expression product is an SLC25A25A IRC polypeptide as set forth in any one of SEQ ID NO: 250, 252, 254, 256, 258, 260 or 262.

132. A method according to claim 100 or claim 101, wherein the COQ2 IRC marker expression product comprises a nucleotide sequence corresponding to an exon selected from COQ2 exon 1, or an amino acid sequence encoded by that exon.

133. A method according to claim 132, wherein the COQ2 IRC marker expression product is a COQ2 IRC transcript as set forth in any one of SEQ ID NO: 263, 265 or 267.

134. A method according to claim 132, wherein the COQ2 IRC marker expression product is a COQ2 IRC polypeptide as set forth in any one of SEQ ID NO: 264, 266 or 268.

135. A method according to claim 100 or claim 101, wherein the FANCA IRC marker expression product comprises a nucleotide sequence corresponding to an exon selected from FANCA exon 35, or an amino acid sequence encoded by that exon.

136. A method according to claim 135, wherein the FANCA IRC marker expression product is a FANCA IRC transcript as set forth in any one of SEQ ID NO: 269 or 271.

137. A method according to claim 135, wherein the FANCA IRC marker expression product is a FANCA IRC polypeptide as set forth in any one of SEQ ID NO: 270 or 272.

138. A method according to claim 100 or claim 101, wherein the PIWIL4 IRC marker expression product comprises a nucleotide sequence corresponding to an exon selected from PIWIL4 exons 2, 14, or an amino acid sequence encoded by that exon.

139. A method according to claim 138, wherein the PIWIL4 IRC marker expression product is a PIWIL4 IRC transcript as set forth in any one of SEQ ID NO: 273 or 275.

140. A method according to claim 138, wherein the PIWIL4 IRC marker expression product is a PIWIL4 IRC polypeptide as set forth in any one of SEQ ID NO: 274 or 276.

141. A method according to claim 100 or claim 101, wherein the ZNF335 IRC marker expression product comprises a nucleotide sequence corresponding to an exon selected from ZNF335 exon 5, or an amino acid sequence encoded by that exon.

142. A method according to claim 141, wherein the ZNF335 IRC marker expression product is a ZNF335 IRC transcript as set forth in any one of SEQ ID NO: 277, 279 or 281.

143. A method according to claim 141, wherein the ZNF335 IRC marker expression product is a ZNF335 IRC polypeptide as set forth in any one of SEQ ID NO: 278, 280 or 282.

144. A method according to claim 100 or claim 101, wherein the TEX261 IRC marker expression product comprises a nucleotide sequence corresponding to an exon selected from TEX261 exon 3, or an amino acid sequence encoded by that exon.

145. A method according to claim 144, wherein the TEX261 IRC marker expression product is a TEX261 IRC transcript as set forth in any one of SEQ ID NO: 283 or 285.

146. A method according to claim 144, wherein the TEX261 IRC marker expression product is a TEX261 IRC polypeptide as set forth in any one of SEQ ID NO: 284 or 286.

147. A method according to claim 100 or claim 101, wherein the GABRR2 IRC marker expression product comprises a nucleotide sequence corresponding to an exon selected from GABRR2 exons 7, 8, 9 or an amino acid sequence encoded by that exon.

148. A method according to claim 147, wherein the GABRR2 IRC marker expression product is a GABRR2 IRC transcript as set forth in any one of SEQ ID NO: 287 or 289.

149. A method according to claim 147, wherein the GABRR2 IRC marker expression product is a GABRR2 IRC polypeptide as set forth in any one of SEQ ID NO: 288 or 290.

150. A method according to claim 100 or claim 101, wherein the VOPP1 IRC marker expression product comprises a nucleotide sequence corresponding to an exon selected from VOPP1 exon 3 or an amino acid sequence encoded by that exon.

151. A method according to claim 150, wherein the VOPP1 IRC marker expression product is a VOPP1 IRC transcript as set forth in any one of SEQ ID NO: 291, 293, 295, 297, 299, 301, 303, 305, 307, 309, 311 or 313.

152. A method according to claim 150, wherein the VOPP1 IRC marker expression product is a VOPP1 IRC polypeptide as set forth in any one of SEQ ID NO: 292, 294, 296, 298, 300, 302, 304, 306, 308, 310, 312 or 314.

153. A method according to claim 100 or claim 101, wherein the TTL IRC marker expression product comprises a nucleotide sequence corresponding to an exon selected from TTL exon 7 or an amino acid sequence encoded by that exon.

154. A method according to claim 153, wherein the TTL IRC marker expression product is a TTL IRC transcript as set forth in any one of SEQ ID NO: 315.

155. A method according to claim 153, wherein the TTL IRC marker expression product is a TTL IRC polypeptide as set forth in any one of SEQ ID NO: 316.

156. A method according to claim 100 or claim 101, wherein the CES2 IRC marker expression product comprises a nucleotide sequence corresponding to an exon selected from CES2 exon 1 or an amino acid sequence encoded by that exon.

157. A method according to claim 156, wherein the CES2 IRC marker expression product is a CES2 IRC transcript as set forth in any one of SEQ ID NO: 317 or 319.

158. A method according to claim 156, wherein the CES2 IRC marker expression product is a CES2 IRC polypeptide as set forth in any one of SEQ ID NO: 318 or 320.

159. A method according to claim 100 or claim 101, wherein the GALNT10 IRC marker expression product comprises a nucleotide sequence corresponding to an exon selected from GALNT10 exon 6 or an amino acid sequence encoded by that exon.

160. A method according to claim 159, wherein the GALNT10 IRC marker expression product is a GALNT10 IRC transcript as set forth in any one of SEQ ID NO: 321 or 323.

161. A method according to claim 159, wherein the GALNT10 IRC marker expression product is a GALNT10 IRC polypeptide as set forth in any one of SEQ ID NO: 322 or 324.

162. A method according to claim 100 or claim 101, wherein the C1orf91 IRC marker expression product comprises a nucleotide sequence corresponding to an exon selected from C1orf91 exon 2 or an amino acid sequence encoded by that exon.

163. A method according to claim 162, wherein the C1orf91 IRC marker expression product is a C1orf91 IRC transcript as set forth in any one of SEQ ID NO: 325, 327, 329, 331, 333 or 335.

164. A method according to claim 162, wherein the C1orf91 IRC marker expression product is a C1orf91 IRC polypeptide as set forth in any one of SEQ ID NO: 326, 328, 330, 332, 334 or 336.

165. A method according to claim 100 or claim 101, wherein the AMBRA1 IRC marker expression product comprises a nucleotide sequence corresponding to an exon selected from AMBRA1 exons 2, 4 or an amino acid sequence encoded by that exon.

166. A method according to claim 165, wherein the AMBRA1 IRC marker expression product is a AMBRA1 IRC transcript as set forth in any one of SEQ ID NO: 337, 339, 341, 343, 345 or 347.

167. A method according to claim 165, wherein the AMBRA1 IRC marker expression product is a AMBRA1 IRC polypeptide as set forth in any one of SEQ ID NO: 338, 340, 342, 344, 346 or 348.

168. A method according to claim 100 or claim 101, wherein the SCRN IRC marker expression product comprises a nucleotide sequence corresponding to an exon selected from SCRN exon 5 or an amino acid sequence encoded by that exon.

169. A method according to claim 168, wherein the SCRN IRC marker expression product is a SCRN IRC transcript as set forth in any one of SEQ ID NO: 349, 3512, 353, 355, 357, 359 or 361.

170. A method according to claim 168, wherein the SCRN IRC marker expression product is a SCRN IRC polypeptide as set forth in any one of SEQ ID NO: 350, 352, 354, 356, 358, 360 or 362.

171. A method according to any one of claims 1 to 7, wherein the presence or risk of development of inSIRS is determined by detecting in the subject a increase in the level of at least 1, 2, 3, 4, 5, 6, 7, 8, 9, 10, 11, 12, 13, 14, 15, 16, 17, 18, 19 or 20 IRC marker expression(s) product from at least one multi-transcript-producing gene selected from the group consisting of: GRINL1A and KATLNAL2 (i.e., LIST D), as compared to the level of the corresponding IRC marker expression product in a sepsis-positive control subject.

172. A method according to any one of claims 1 to 6, or 8, wherein the presence or risk of development of sepsis is determined by detecting in the subject an decrease in the level of at least 1, 2, 3, 4, 5, 6, 7, 8, 9, 10, 11, 12, 13, 14, 15, 16, 17, 18, 19 or 20 IRC marker expression product(s) from at least one multi-transcript-producing gene selected from the group consisting of GRINL1A and KATLNAL2 (hereafter referred to as “LIST D”), as compared to the level of a corresponding IRC marker expression product in an inSIRS-positive control subject.

173. A method according to claim 171 or claim 172, wherein the GRINL1A marker expression product comprises a nucleotide sequence corresponding to an exon selected from GRINL1A exon 5 or an amino acid sequence encoded by that exon.

174. A method according to claim 173, wherein the GRINL1A IRC marker expression product is a GRINL1A IRC transcript as set forth in any one of SEQ ID NO: 363, 365, 367, 369, 371, 373, 375 or 377.

175. A method according to claim 173, wherein the GRINL1A IRC marker expression product is a GRINL1A IRC polypeptide as set forth in any one of SEQ ID NO: 364, 366, 368, 370, 372, 374, 376 or 378.

176. A method according to claim 171 or claim 172, wherein the KATNAL2 marker expression product comprises a nucleotide sequence corresponding to an exon selected from KATNAL2 exon 3 or an amino acid sequence encoded by that exon.

177. A method according to claim 176, wherein the KATNAL2 IRC marker expression product is a KATNAL2 IRC transcript as set forth in any one of SEQ ID NO: 379 or 381.

178. A method according to claim 176, wherein the KATNAL2 IRC marker expression product is a KATNAL2 IRC polypeptide as set forth in any one of SEQ ID NO: 380 or 382.

179. A method according to any one of claims 1 to 7, wherein the presence or risk of development of inSIRS is determined by detecting in the subject an increase in the level of at least 1, 2, 3, 4, 5, 6, 7, 8, 9, 10, 11, 12, 13, 14, 15, 16, 17, 18, 19, 20, 21, 22, 23, 24, 25, 26, 27, 28, 29, 30, 31, 32, 33, 34, 35, 36, 37 or 38 IRC marker expression products) from at least one multi-transcript-producing gene selected from the group consisting of: KATLNAL2, GRINL1A, ACRC, TG and ASPHD2 (hereafter referred to as “LIST E”), as compared to the level of a corresponding IRC marker expression product in an post-surgical inflammation-positive control subject.

180. A method according to any one of claims 1 to 6, or 8, wherein the presence or risk of development of post-surgical inflammation is determined by detecting in the subject a decrease in the level of at least 1, 2, 3, 4, 5, 6, 7, 8, 9, 10, 11, 12, 13, 14, 15, 16, 17, 18, 19, 20, 21, 22, 23, 24, 25, 26, 27, 28, 29, 30, 31, 32, 33, 34, 35, 36, 37 or 38 IRC marker expression(s) product from at least one multi-transcript-producing gene selected from the group consisting of: KATLNAL2, GRINL1A, ACRC, TG and ASPHD2 (i.e., LIST E), as compared to the level of the corresponding IRC marker expression product in a inSIRS-positive control subject.

181. A method according to claim 179 or claim 180, wherein the KATLNAL2 IRC marker expression product comprises a nucleotide sequence corresponding to an exon selected from KATLNAL2 exon 3, or an amino acid sequence encoded by that exon.

182. A method according to claim 181, wherein the KATLNAL2 IRC marker expression product is a KATLNAL2 IRC transcript as set forth in any one of SEQ ID NO: 387 or 389.

183. A method according to claim 181, wherein the KATLNAL2 IRC marker expression product is a KATLNAL2 IRC polypeptide as set forth in any one of SEQ ID NO: 388 or 390.

184. A method according to claim 179 or claim 180, wherein the GRINL1A IRC marker expression product comprises a nucleotide sequence corresponding to an exon selected from GRINL1A exon 5, or an amino acid sequence encoded by that exon.

185. A method according to claim 184, wherein the GRINL1A IRC marker expression product is a GRINL1A IRC transcript as set forth in any one of SEQ ID NO: 391, 393, 395, 397, 399, 401, 403 or 405.

186. A method according to claim 184, wherein the GRINL1A IRC marker expression product is a GRINL1 A IRC polypeptide as set forth in any one of SEQ ID NO: 392, 394, 396, 398, 400, 402, 404 or 406.

187. A method according to claim 179 or claim 180, wherein the ACRC IRC marker expression product comprises a nucleotide sequence corresponding to an exon selected from ACRC exon 3, 5 or an amino acid sequence encoded by that exon.

188. A method according to claim 187, wherein the ACRC IRC marker expression product is a ACRC IRC transcript as set forth in any one of SEQ ID NO:407 or 409.

189. A method according to claim 187, wherein the ACRC IRC marker expression product is a ACRC IRC polypeptide as set forth in any one of SEQ ID NO: 408 or 410.

190. A method according to claim 179 or claim 180, wherein the TG IRC marker expression product comprises a nucleotide sequence corresponding to an exon selected from TG exon 6 or an amino acid sequence encoded by that exon.

191. A method according to claim 190, wherein the TG IRC marker expression product is a TG IRC transcript as set forth in any one of SEQ ID NO:411 or 413.

192. A method according to claim 190, wherein the TG IRC marker expression product is a TG IRC polypeptide as set forth in any one of SEQ ID NO: 412 or 414.

193. A method according to claim 179 or claim 180, wherein the ASPHD2 IRC marker expression product comprises a nucleotide sequence corresponding to an exon selected from ASPHD2 exon 4 or an amino acid sequence encoded by that exon.

194. A method according to claim 193, wherein the ASPHD2 IRC marker expression product is an ASPHD2 IRC transcript as set forth in any one of SEQ ID NO:415, 417 or 419.

195. A method according to claim 193, wherein the ASPHD2 IRC marker expression product is an ASPHD2 IRC polypeptide as set forth in any one of SEQ ID NO: 416, 418 or 420.

196. A method according to any one of claims 1 to 7, wherein the presence or risk of development of post-surgical inflammation is determined by detecting in the subject an increase in the level of at least 1, 2, 3, 4, 5, 6, 7, 8, 9, 10, 11, 12, 13, 14, 15, 16, 17, 18, 19, 20, 21, 22, 23, 24, 25, 26, 27, 28, 29, 30, 31, 32, 33, 34, 35, 36, 37, 38, 39, 40, 41, 42, 43, 44, 45, 46, 47, 48, 49, 50, 51, 52, 53, 54, 55, 56, 57, 58, 59, 60, 61, 62, 63, 64, 65, 66, 67, 68, 69, 70, 71, 72, 73, 74, 75, 76, 77, 78, 79, 80, 81, 82, 83, 84, 85, 86, 87, 88, 89, 90, 91, 92, 93, 94, 95 or 96 IRC marker expression(s) product from at least one multi-transcript-producing gene selected from the group consisting of: CUL7, BTNL8/3, PANX2, C1orf91, ZNF335, MGRN1, GAA, CDK5R1, SNTB2, CLPB, ADMA19, SLC36A1, FKBP9, NDST1, HIPK2 and CEACAM4 (i.e., LIST F), as compared to the level of the corresponding IRC marker expression product in a inSIRS-positive control subject.

197. A method according to any one of claims 1 to 6, or 8, wherein the presence or risk of development of inSIRS is determined by detecting in the subject a decrease in the level of at least 1, 2, 3, 4, 5, 6, 7, 8, 9, 10, 11, 12, 13, 14, 15, 16, 17, 18, 19, 20, 21, 22, 23, 24, 25, 26, 27, 28, 29, 30, 31, 32, 33, 34, 35, 36, 37, 38, 39, 40, 41, 42, 43, 44, 45, 46, 47, 48, 49, 50, 51, 52, 53, 54, 55, 56, 57, 58, 59, 60, 61, 62, 63, 64, 65, 66, 67, 68, 69, 70, 71, 72, 73, 74, 75, 76, 77, 78, 79, 80, 81, 82, 83, 84, 85, 86, 87, 88, 89, 90, 91, 92, 93, 94, 95 or 96 IRC marker expression product(s) from at least one multi-transcript-producing gene selected from the group consisting of CUL7, BTNL8/3, PANX2, C1orf91, ZNF335, MGRN1, GAA, CDK5R1, SNTB2, CLPB, ADMA19, SLC36A1, FKBP9, NDST1, HIPK2 and CEACAM4 (hereafter referred to as “LIST F”), as compared to the level of a corresponding IRC marker expression product in an post-surgical inflammation-positive control subject.

198. A method according to claim 196 or claim 197, wherein the CUL7 IRC marker expression product comprises a nucleotide sequence corresponding to an exon selected from CUL7 exon 5 or an amino acid sequence encoded by that exon.

199. A method according to claim 198, wherein the CUL7 IRC marker expression product is a CUL7 IRC transcript as set forth in any one of SEQ ID NO: 421.

200. A method according to claim 198, wherein the CUL7 IRC marker expression product is a CUL7 IRC polypeptide as set forth in any one of SEQ ID NO: 422.

201. A method according to claim 196 or claim 197, wherein the BTNL8/3 IRC marker expression product comprises a nucleotide sequence corresponding to an exon selected from BTNL8/3 exon 6 or an amino acid sequence encoded by that exon.

202. A method according to claim 201, wherein the BTNL8 IRC marker expression product is a BTNL8/3 IRC transcript as set forth in any one of SEQ ID NO: 423, 425, 427, 429, 431 or 433.

203. A method according to claim 201, wherein the BTNL8 IRC marker expression product is a BTNL8/3 IRC polypeptide as set forth in any one of SEQ ID NO: 424, 426, 428, 430, 432 or 434.

204. A method according to claim 196 or claim 197, wherein the PANX2 IRC marker expression product comprises a nucleotide sequence corresponding to an exon selected from PANX2 exon 1, 2 or an amino acid sequence encoded by that exon.

205. A method according to claim 204, wherein the PANX2 IRC marker expression product is a PANX2 IRC transcript as set forth in any one of SEQ ID NO: 435, 437 or 439.

206. A method according to claim 204, wherein the PANX2 IRC marker expression product is a PANX2 IRC polypeptide as set forth in any one of SEQ ID NO: 436, 438 or 440.

207. A method according to claim 196 or claim 197, wherein the C1orf91 IRC marker expression product comprises a nucleotide sequence corresponding to an exon selected from C1orf91 exon 2 or an amino acid sequence encoded by that exon.

208. A method according to claim 207, wherein the C1orf91 IRC marker expression product is a C1orf91 IRC transcript as set forth in any one of SEQ ID NO: 441, 443, 445, 447, 449 or 451.

209. A method according to claim 207, wherein the C1orf91 IRC marker expression product is a C1orf91 IRC polypeptide as set forth in any one of SEQ ID NO: 442, 444, 446, 448, 450 or 452.

210. A method according to claim 196 or claim 197, wherein the ZNF335 IRC marker expression product comprises a nucleotide sequence corresponding to an exon selected from ZNF335 exon 5 or an amino acid sequence encoded by that exon.

211. A method according to claim 210, wherein the ZNF335 IRC marker expression product is a ZNF335 IRC transcript as set forth in any one of SEQ ID NO: 453, 455 or 457.

212. A method according to claim 210, wherein the ZNF335 IRC marker expression product is a ZNF335 IRC polypeptide as set forth in any one of SEQ ID NO: 454, 456 or 458.

213. A method according to claim 196 or claim 197, wherein the MGRN1 IRC marker expression product comprises a nucleotide sequence corresponding to an exon selected from MGRN1 exon 4 or an amino acid sequence encoded by that exon.

214. A method according to claim 213, wherein the MGRN1 IRC marker expression product is a MGRN1 IRC transcript as set forth in any one of SEQ ID NO: 459, 461 or 463.

215. A method according to claim 213, wherein the MGRN1 IRC marker expression product is a MGRN1 IRC polypeptide as set forth in any one of SEQ ID NO:460, 462 or 464.

216. A method according to claim 196 or claim 197, wherein the GAA IRC marker expression product comprises a nucleotide sequence corresponding to an exon selected from GAA exon 3 or an amino acid sequence encoded by that exon.

217. A method according to claim 216, wherein the GAA IRC marker expression product is a GAA IRC transcript as set forth in any one of SEQ ID NO: 465, 467 or 469.

218. A method according to claim 216, wherein the GAA IRC marker expression product is a GAA IRC polypeptide as set forth in any one of SEQ ID NO:466, 468 or 470.

219. A method according to claim 196 or claim 197, wherein the CDK5R1 IRC marker expression product comprises a nucleotide sequence corresponding to an exon selected from CDK5R1 exon 2 or an amino acid sequence encoded by that exon.

220. A method according to claim 219, wherein the CDK5R1 IRC marker expression product is a CDK5R1 IRC transcript as set forth in any one of SEQ ID NO: 471.

221. A method according to claim 219, wherein the CDK5R1 IRC marker expression product is a CDK5R1 IRC polypeptide as set forth in any one of SEQ ID NO: 472.

222. A method according to claim 196 or claim 197, wherein the SNTB2 IRC marker expression product comprises a nucleotide sequence corresponding to an exon selected from SNTB2 exon 4 or an amino acid sequence encoded by that exon.

223. A method according to claim 222, wherein the SNTB2 IRC marker expression product is a SNTB2 IRC transcript as set forth in any one of SEQ ID NO: 473.

224. A method according to claim 222, wherein the SNTB2 IRC marker expression product is a SNTB2 IRC polypeptide as set forth in any one of SEQ ID NO: 474.

225. A method according to claim 196 or claim 197, wherein the CLPB IRC marker expression product comprises a nucleotide sequence corresponding to an exon selected from CLPB exon 10 or an amino acid sequence encoded by that exon.

226. A method according to claim 225, wherein the CLPB IRC marker expression product is a CLPB IRC transcript as set forth in any one of SEQ ID NO: 475, 477 or 479.

227. A method according to claim 225, wherein the CLPB IRC marker expression product is a CLPB IRC polypeptide as set forth in any one of SEQ ID NO: 478 or 480.

228. A method according to claim 196 or claim 197, wherein the ADAM19 IRC marker expression product comprises a nucleotide sequence corresponding to an exon selected from ADAM19 exon 10 or an amino acid sequence encoded by that exon.

229. A method according to claim 228, wherein the ADAM19 IRC marker expression product is an ADAM19 IRC transcript as set forth in any one of SEQ ID NO: 481, 483, 485 or 487.

230. A method according to claim 228, wherein the ADAM19 IRC marker expression product is an ADAM19 IRC polypeptide as set forth in any one of SEQ ID NO: 482, 484, 486 or 488.

231. A method according to claim 196 or claim 197, wherein the SLC36A1 IRC marker expression product comprises a nucleotide sequence corresponding to an exon selected from SLC36A1 exon 5 or an amino acid sequence encoded by that exon.

232. A method according to claim 231, wherein the SLC36A1 IRC marker expression product is a SLC36A1 IRC transcript as set forth in any one of SEQ ID NO: 489, 491, 493 or 495.

233. A method according to claim 231, wherein the SLC36A1 IRC marker expression product is a SLC36A1 IRC polypeptide as set forth in any one of SEQ ID NO: 490, 492, 494 or 496.

234. A method according to claim 196 or claim 197, wherein the FKBP9 IRC marker expression product comprises a nucleotide sequence corresponding to an exon selected from FKBP9 exon 10 or an amino acid sequence encoded by that exon.

235. A method according to claim 234, wherein the FKBP9 IRC marker expression product is a FKBP9 IRC transcript as set forth in any one of SEQ ID NO: 497 or 499.

236. A method according to claim 234, wherein the FKBP9 IRC marker expression product is a FKBP9 IRC polypeptide as set forth in any one of SEQ ID NO: 498 or 500.

237. A method according to claim 196 or claim 197, wherein the NDST1 IRC marker expression product comprises a nucleotide sequence corresponding to an exon selected from NDST1 exon 3 or an amino acid sequence encoded by that exon.

238. A method according to claim 237, wherein the NDST1 IRC marker expression product is a NDST1 IRC transcript as set forth in any one of SEQ ID NO: 501 or 503.

239. A method according to claim 237, wherein the NDST1 IRC marker expression product is a NDST1 IRC polypeptide as set forth in any one of SEQ ID NO: 502 or 504.

240. A method according to claim 196 or claim 197, wherein the HIPK2 IRC marker expression product comprises a nucleotide sequence corresponding to an exon selected from HIPK2 exon 11 or an amino acid sequence encoded by that exon.

241. A method according to claim 240, wherein the HIPK2 IRC marker expression product is a HIPK2 IRC transcript as set forth in any one of SEQ ID NO: 505, 507, 509 or 511.

242. A method according to claim 240, wherein the HIPK2 IRC marker expression product is a HIPK2 IRC polypeptide as set forth in any one of SEQ ID NO: 506, 508, 510 or 512.

243. A method according to claim 196 or claim 197, wherein the CEACAM4 IRC marker expression product comprises a nucleotide sequence corresponding to an exon selected from CEACAM4 exon 5, 7, 23 or an amino acid sequence encoded by that exon.

244. A method according to claim 243, wherein the CEACAM4 IRC marker expression product is a CEACAM4 IRC transcript as set forth in any one of SEQ ID NO: 513 or 515.

245. A method according to claim 243, wherein the CEACAM4 IRC marker expression product is a CEACAM4 IRC polypeptide as set forth in any one of SEQ ID NO: 514 or 516.

246. A method according to any one of claims 1 to 245, comprising detecting the level of at least one IRC marker expression product from two or more of LISTS A, B, C, D, E and F.

247. A method according to claim 246, comprising detecting the level of at least one IRC marker expression product from LIST A and the level of at least one other IRC marker expression product from LIST B.

248. A method according to claim 246, comprising detecting the level of at least one IRC marker expression product from LIST A and the level of at least one other IRC marker expression product from LIST C.

249. A method according to claim 246, comprising detecting the level of at least one IRC marker expression product from LIST A and the level of at least one other IRC marker expression product from LIST D.

250. A method according to claim 246, comprising detecting the level of at least one IRC marker expression product from LIST A and the level of at least one other IRC marker expression product from LIST E.

251. A method according to claim 246, comprising detecting the level of at least one IRC marker expression product from LIST A and the level of at least one other IRC marker expression product from LIST F.

252. A method according to claim 246, comprising detecting the level of at least one IRC marker expression product from LIST B and the level of at least one other IRC marker expression product from LIST C.

253. A method according to claim 246, comprising detecting the level of at least one IRC marker expression product from LIST B and the level of at least one other IRC marker expression product from LIST D.

254. A method according to claim 246, comprising detecting the level of at least one IRC marker expression product from LIST B and the level of at least one other IRC marker expression product from LIST E.

255. A method according to claim 246, comprising detecting the level of at least one IRC marker expression product from LIST B and the level of at least one other IRC marker expression product from LIST F.

256. A method according to claim 246, comprising detecting the level of at least one IRC marker expression product from LIST C and the level of at least one other IRC marker expression product from LIST D.

257. A method according to claim 246, comprising detecting the level of at least one IRC marker expression product from LIST C and the level of at least one other IRC marker expression product from LIST E.

258. A method according to claim 246, comprising detecting the level of at least one IRC marker expression product from LIST C and the level of at least one other IRC marker expression product from LIST F.

259. A method according to claim 246, comprising detecting the level of at least one IRC marker expression product from LIST D and the level of at least one other IRC marker expression product from LIST E.

260. A method according to claim 246, comprising detecting the level of at least one IRC marker expression product from LIST D and the level of at least one other IRC marker expression product from LIST F.

261. A method according to claim 246, comprising detecting the level of at least one IRC marker expression product from LIST E and the level of at least one other IRC marker expression product from LIST F.

262. A method according to any one of claims 1 to 245, comprising detecting the level of at least one IRC marker expression product from each of three lists selected from LISTS A, B, C, D, E and F.

263. A method according to claim 262, comprising detecting the level of at least one IRC marker expression product from LIST A and the level of at least one other IRC marker expression product from LIST B and the level of at least one other IRC marker expression product from LIST C.

264. A method according to claim 262, comprising detecting the level of at least one IRC marker expression product from LIST A and the level of at least one other IRC marker expression product from LIST B and the level of at least one other IRC marker expression product from LIST D.

265. A method according to claim 262, comprising detecting the level of at least one IRC marker expression product from LIST A and the level of at least one other IRC marker expression product from LIST B and the level of at least one other IRC marker expression product from LIST E.

266. A method according to claim 262, comprising detecting the level of at least one IRC marker expression product from LIST A and the level of at least one other IRC marker expression product from LIST B and the level of at least one other IRC marker expression product from LIST F.

267. A method according to claim 262, comprising detecting the level of at least one IRC marker expression product from LIST B and the level of at least one other IRC marker expression product from LIST C and the level of at least one other IRC marker expression product from LIST D.

268. A method according to claim 262, comprising detecting the level of at least one IRC marker expression product from LIST B and the level of at least one other IRC marker expression product from LIST C and the level of at least one other IRC marker expression product from LIST E.

269. A method according to claim 262, comprising detecting the level of at least one IRC marker expression product from LIST B and the level of at least one other IRC marker expression product from LIST C and the level of at least one other IRC marker expression product from LIST F.

270. A method according to claim 262, comprising detecting the level of at least one IRC marker expression product from LIST C and the level of at least one other IRC marker expression product from LIST D and the level of at least one other IRC marker expression product from LIST E.

271. A method according to claim 262, comprising detecting the level of at least one IRC marker expression product from LIST C and the level of at least one other IRC marker expression product from LIST D and the level of at least one other IRC marker expression product from LIST F.

272. A method according to claim 262, comprising detecting the level of at least one IRC marker expression product from LIST D and the level of at least one other IRC marker expression product from LIST E and the level of at least one other IRC marker expression product from LIST F.

273. A method according to any one of claims 1 to 245, comprising detecting the level of at least one IRC marker expression product from each of four lists selected from LISTS A, B, C, D, E and F.

274. A method according to claim 273, comprising detecting the level of at least one IRC marker expression product from LIST A and the level of at least one other IRC marker expression product from LIST B and the level of at least one other IRC marker expression product from LIST C and the level of at least one other IRC marker expression product from LIST D.

275. A method according to claim 273, comprising detecting the level of at least one IRC marker expression product from LIST A and the level of at least one other IRC marker expression product from LIST B and the level of at least one other IRC marker expression product from LIST C and the level of at least one other IRC marker expression product from LIST E.

276. A method according to claim 273, comprising detecting the level of at least one IRC marker expression product from LIST A and the level of at least one other IRC marker expression product from LIST B and the level of at least one other IRC marker expression product from LIST C and the level of at least one other IRC marker expression product from LIST F.

277. A method according to claim 273, comprising detecting the level of at least one IRC marker expression product from LIST B and the level of at least one other IRC marker expression product from LIST C and the level of at least one other IRC marker expression product from LIST D and the level of at least one other IRC marker expression product from LIST E.

278. A method according to claim 273, comprising detecting the level of at least one IRC marker expression product from LIST B and the level of at least one other IRC marker expression product from LIST C and the level of at least one other IRC marker expression product from LIST D and the level of at least one other IRC marker expression product from LIST F.

279. A method according to claim 273, comprising detecting the level of at least one IRC marker expression product from LIST A and the level of at least one other IRC marker expression product from LIST C and the level of at least one other IRC marker expression product from LIST D and the level of at least one other IRC marker expression product from LIST E.

280. A method according to claim 273, comprising detecting the level of at least one IRC marker expression product from LIST A and the level of at least one other IRC marker expression product from LIST C and the level of at least one other IRC marker expression product from LIST D and the level of at least one other IRC marker expression product from LIST F.

281. A method according to claim 273, comprising detecting the level of at least one IRC marker expression product from LIST A and the level of at least one other IRC marker expression product from LIST D and the level of at least one other IRC marker expression product from LIST E and the level of at least one other IRC marker expression product from LIST F.

282. A method according to claim 273, comprising detecting the level of at least one IRC marker expression product from LIST A and the level of at least one other IRC marker expression product from LIST B and the level of at least one other IRC marker expression product from LIST D and the level of at least one other IRC marker expression product from LIST E.

283. A method according to claim 273, comprising detecting the level of at least one IRC marker expression product from LIST C and the level of at least one other IRC marker expression product from LIST D and the level of at least one other IRC marker expression product from LIST E and the level of at least one other RC marker expression product from LIST F.

284. A method according to any one of claims 1 to 245, comprising detecting the level of at least one IRC marker expression product from each of five lists selected from LISTS A, B, C, D, E and F.

285. A method according to claim 284, comprising detecting the level of at least one IRC marker expression product from LIST A and the level of at least one other IRC marker expression product from LIST B and the level of at least one other IRC marker expression product from LIST C and the level of at least one other IRC marker expression product from LIST D and the level of at least one other IRC marker expression product from LIST E.

286. A method according to claim 284, comprising detecting the level of at least one IRC marker expression product from LIST A and the level of at least one other IRC marker expression product from LIST B and the level of at least one other IRC marker expression product from LIST C and the level of at least one other IRC marker expression product from LIST D and the level of at least one other IRC marker expression product from LIST F.

287. A method according to claim 284, comprising detecting the level of at least one IRC marker expression product from LIST A and the level of at least one other IRC marker expression product from LIST C and the level of at least one other IRC marker expression product from LIST D and the level of at least one other IRC marker expression product from LIST E and the level of at least one other IRC marker expression product from LIST F.

288. A method according to claim 284, comprising detecting the level of at least one IRC marker expression product from LIST B and the level of at least one other IRC marker expression product from LIST C and the level of at least one other IRC marker expression product from LIST D and the level of at least one other IRC marker expression product from LIST E and the level of at least one other IRC marker expression product from LIST F.

289. A method according to claim 284, comprising detecting the level of at least one IRC marker expression product from LIST A and the level of at least one other IRC marker expression product from LIST B and the level of at least one other IRC marker expression product from LIST D and the level of at least one other IRC marker expression product from LIST E and the level of at least one other IRC marker expression product from LIST F.

290. A method according to any one of claims 1 to 245, comprising detecting the level of at least one IRC marker expression product from each of LISTS A, B, C, D, E and F.

291. A method according to claim 5, comprising diagnosing the absence of sepsis, inSIRS or post surgical inflammation when the measured level or functional activity of the or each IRC expression product is the same as or similar to the measured level or functional activity of the or each corresponding expression product when the control subject is a normal subject.

292. A method according to claim 291, wherein the measured level of an individual IRC expression product varies from the measured level of an individual corresponding expression product by no more than about 20%.

293. A method according to claim 5, wherein the biological sample comprises blood, especially peripheral blood, which suitably includes leukocytes.

294. A method for treating, preventing or inhibiting the development of at least one condition selected from sepsis, inSIRS or post-surgical inflammation in a subject, the method comprising:
comparing the level of at least one IRC expression product of a multi-transcript-producing gene in the subject to the level of a corresponding IRC marker expression product in at least one control subject selected from: a post-surgical inflammation-positive subject, an inSIRS positive subject, and a sepsis-positive subject, wherein a difference between the level of the at least one IRC marker expression product and the level of the corresponding IRC marker expression product indicates whether the subject has, or is at risk of developing, one of the conditions, wherein the at least one IRC marker expression product is predetermined as being differentially expressed between at least two of the conditions and wherein at least one other expression product from the multi-transcript producing gene is predetermined as being not so differentially expressed; and
administering to the subject, on the basis that the subject tests positive for sepsis, an effective amount of an agent that treats or ameliorates the symptoms or reverses or inhibits the development of sepsis, or
administering to the subject, on the basis that the subject tests positive for inSIRS, an effective amount of an agent that treats or ameliorates the symptoms or reverses or inhibits the development of inSIRS; or
administering to the subject, on the basis that the subject tests positive for post-surgical inflammation, an effective amount of an agent that treats or ameliorates the symptoms or reverses or inhibits the development of post-surgical inflammation.

295. A method according to claim 294, wherein the sepsis treatment or agent is selected from antibiotics, intravenous fluids, vasoactives, palliative support for damaged or distressed organs and close monitoring of vital organs.

296. A method according to claim 294, wherein the inSIRS treatment or agent is selected from antibiotics, steroids, intravenous fluids, glucocorticoids, vasoactives, palliative support for damaged or distressed organs (e.g. oxygen for respiratory distress, fluids for hypovolemia) and close monitoring of vital organs.

297. A method according to claim 294, wherein the post-surgical inflammation treatment or agent is selected from antibiotics, intravenous fluids and anti-inflammatory agents.
